(19) United States
(12) Patent Application Publication
(10) Pub. No.: US 2009/0208531 A1
(43) Pub. Date: Aug. 20, 2009

(54) ANTIVIRAL AGENTS AND VACCINES AGAINST INFLUENZA

(75) Inventors: Gary J. Nabel, Washington, DC (US); Wing-pui Kong, Germantown, MD (US); Zhi-yong Yang, Potomac, MD (US)

Correspondence Address: KNOBBE, MARTENS, OLSON & BEAR, LLP, 2040 MAIN STREET, FOURTEENTH FLOOR, IRVINE, CA, 92614, US

(73) Assignee: National Institutes of Health Office of Technology, Rockville, MD (US)

(21) Appl. No.: 12/279,332

(22) PCT Filed: Feb. 16, 2007
(86) PCT No.: PCT/US07/04506

§ 371 Date: Feb. 17, 2009

Related U.S. Application Data
(60) Provisional application No. 60/774,923, filed on Feb. 16, 2006.

(51) Int. Cl. A61K 39/145; C12N 15/11; A61K 31/7088; C12N 15/00

(52) U.S. Cl. 424/209.1; 536/23.1; 435/320.1; 514/44 R; 435/5

(57) ABSTRACT

These vaccines target H5N1, H1, H3 and other subtypes of influenza and are designed to elicit neutralizing antibodies, as well as cellular immunity. The DNA vaccines express hemagglutinin (HA) or nucleoprotein (NP) proteins from influenza which are codon optimized and/or contain modifications to protease cleavage sites of HA which affect the normal function of the protein. Adenoviral constructs expressing the same inserts have been engineered for prime boost strategies. Protein-based vaccines based on protein production from insect or mammalian cells using foldon trimerization stabilization domains with or without cleavage sites to assist in purification of such proteins have been developed. Another embodiment of this invention is the work with HA pseudotyped lentiviral vectors which would be used to screen for neutralizing antibodies in patients and to screen for diagnostic and therapeutic antivirals such as monoclonal antibodies.

### RELATED APPLICATIONS

[0001] This application claims the benefit of U.S. Provisional Application No. 60/774,923 filed Feb. 16, 2006 which is hereby incorporated by reference in its entirety.

### FIELD OF THE INVENTION

[0002] The present invention relates to the field of molecular biology. The present invention discloses influenza virus proteins, related nucleotide sequences, and usage for immunization by gene-based vaccines and recombinant proteins.

### DESCRIPTION OF THE RELATED ART

[0003] The significant public health impact of Influenza A and B virus infections is compounded by the threat of emerging virus strains. Concerns exist that avian influenza virus (H5N1), endemic in poultry in Southeast Asia, may trigger a pandemic in humans should the virus evolve to spread from human-to-human. The currently licensed influenza vaccines include inactivated influenza vaccines, propagated in embryonated chicken eggs (i.e., Fluzone®, Sanofi Pasteur, Inc.; Fluvirin®), Chiron Corporation; Flaurix™, GlaxoSmithKline, Inc.), and a cold-adapted, live attenuated influenza vaccine delivered intranasally (Flumist®, Medimmune Vaccines, Inc.). While highly efficacious, these vaccines depend upon labor-intensive methods and limited manufacturing capacity. Sanofi Pasteur, Inc. and Chiron Corporation are both producing inactivated vaccines for H5N1 avian influenza. The Sanofi Pasteur, Inc. product has proven to be well-tolerated in 300 volunteers (Sanofi_Pasteur, on the world-wide web at sanofipasteur.com/sanofipasteur/front/templates/vaccinations-travel-health-vaccine-aventis-pasteurjsp?&lang=EN&codeRubrique=13&codePage=CP_{—}15_{—}12_{—}2005, (cited Dec. 15, 2005)). However, there is serious concern that the currently available production methodology cannot meet world-wide public health needs.

[0004] Several new technologies have undergone evaluation in hundreds of research subjects in clinical studies, including protein subunit vaccines directed against Influenza A and avian influenza H5N1 strains (Protein Sciences Corporation, on the world-wide-web at proteinsciences.com/aboutus/pdf/PhaseII-IIIresults-June2005-2.pdf., cited Jun. 14, 2005), virosomes or lipid antigen-presenting systems (Solvay Pharmaceuticals) (de Bruijn, I. A. et al. 2005 Vaccine 23 (Suppl I):S39-49), adenoviral vectored vaccines (Vaxin (Van Kampen, K. R. et al. 2005 Vaccine 23:1029-1036)) and an epidermal DNA vaccine, coated onto gold beads and delivered by the PowderJect device (Drape, R. J. et al. 2005 Vaccine 24:4475-4481 2005). Other technology, including recombinant particulate vaccines with influenza proteins assembled into virus-like particles, are in preclinical stages of evaluation (Girard, M. P. et al. 2005 Vaccine 23:5708-5724).

[0005] A report of a February 2004 World Health Organization meeting underscored the need for new broad-spectrum influenza vaccines capable of inducing long-lasting immune responses (Cassetti, M. C. et al 2005 Vaccine 23:1529-1533). The meeting participants recommended that plasmid DNA-based technology, having demonstrated preclinical efficacy and fast and relatively easy manufacturing processes, should be assessed as an alternative to conventional influenza strategies (Cassetti, M. C. et al. 2005 Vaccine 23:1529-1533). The goal would be to develop a broader more universal vaccine that would protect against multiple influenza strains.

### SUMMARY OF THE INVENTION

[0006] This invention describes the development of plasmid DNA vaccines and plasmid DNA prime/protein boost strategies for prevention of influenza.

[0007] These vaccines target H5N1, H1, H3 and other subtypes of influenza and are designed to elicit neutralizing antibodies, as well as cellular immunity. The DNA vaccines express hemagglutinin (HA) or nucleoprotein (NP) proteins from influenza which are codon optimized and/or contain modifications to protease cleavage sites of HA which affect the normal function of the protein. They have been constructed in a different CMV/R or CMV/R 8 κB expression backbone. Adenoviral constructs expressing the same inserts have been engineered for prime boost strategies.

[0008] Protein-based vaccines based on protein production from insect or mammalian cells using foldon trimerization stabilization domains with or without cleavage sites to assist in purification of such proteins have been developed.

[0009] This invention provides a vaccine strategy for controlling influenza epidemics, including avian flu, should it cross over to humans, the 1918 strain of flu, and seasonal flu strains. In addition, the invention is designed to lead to a combination vaccine to provide a broadly protective vaccine.

[0010] Another embodiment of this invention is the work with HA pseudotyped lentiviral vectors which would be used to screen for neutralizing antibodies in patients and to screen for diagnostic and therapeutic antivirals such as monoclonal antibodies.

### BRIEF DESCRIPTION OF THE DRAWINGS

[0011] FIG. 1. Schematic diagram and nucleic acid sequence of VRC 9123.

[0012] FIG. 2. Schematic diagram and nucleic acid sequence of VRC 7702.

[0013] FIG. 3. Schematic diagram and nucleic acid sequence of VRC 7703.

[0014] FIG. 4. Schematic diagram and nucleic acid sequence of VRC 7704.

[0015] FIG. 5. Schematic diagram and nucleic acid sequence of VRC 7705.

[0016] FIG. 6. Schematic diagram and nucleic acid sequence of VRC 7706.

[0017] FIG. 7. Schematic diagram and nucleic acid sequence of VRC 7707.

[0018] FIG. 8. Schematic diagram and nucleic acid sequence of VRC 7708.

[0019] FIG. 9. Schematic diagram and nucleic acid sequence of VRC 7712.

[0020] FIG. 10. Schematic diagram and nucleic acid sequence of VRC 7713.

[0021] FIG. 11. Schematic diagram and nucleic acid sequence of VRC 7714.

[0022] FIG. 12. Schematic diagram and nucleic acid sequence of VRC 7715.

[0023] FIG. 13. Schematic diagram and nucleic acid sequence of VRC 7716.

[0024] FIG. 14. Schematic diagram and nucleic acid sequence of VRC 7717.

[0025] FIG. 15. Schematic diagram and nucleic acid sequence of VRC 7718.

[0026] FIG. 16. Schematic diagram and nucleic acid sequence of VRC 7719.

[0027] FIG. 17. Schematic diagram and nucleic acid sequence of 53349.

[0028] FIG. 18. Schematic diagram and nucleic acid sequence of 53350.

[0029] FIG. 19. Schematic diagram and nucleic acid sequence of 53352.

[0030] FIG. 20. Schematic diagram and nucleic acid sequence of 53353.

[0031] FIG. 21. Schematic diagram and nucleic acid sequence of 53355.

[0032] FIG. 22. Schematic diagram and nucleic acid sequence of 53356.

[0033] FIG. 23. Schematic diagram and nucleic acid sequence of 53358.

[0034] FIG. 24. Schematic diagram and nucleic acid sequence of 53359.

[0035] FIG. 25. Schematic diagram and nucleic acid sequence of 53361.

[0036] FIG. 26. Schematic diagram and nucleic acid sequence of 53362.

[0037] FIG. 27. Schematic diagram and nucleic acid sequence of 53364.

[0038] FIG. 28. Schematic diagram and nucleic acid sequence of 53365.

[0039] FIG. 29. Schematic diagram and nucleic acid sequence of 53367.

[0040] FIG. 30. Schematic diagram and nucleic acid sequence of 53320.

[0041] FIG. 31. Schematic diagram and nucleic acid sequence of 53322.

[0042] FIG. 32. Schematic diagram and nucleic acid sequence of 53325.

[0043] FIG. 33. Schematic diagram and nucleic acid sequence of 53326.

[0044] FIG. 34. Schematic diagram and nucleic acid sequence of 53328.

[0045] FIG. 35. Schematic diagram and nucleic acid sequence of 53331.

[0046] FIG. 36. Schematic diagram and nucleic acid sequence of 53332.

[0047] FIG. 37. Schematic diagram and nucleic acid sequence of 53334.

[0048] FIG. 38. Schematic diagram and nucleic acid sequence of 53335.

[0049] FIG. 39. Schematic diagram and nucleic acid sequence of 53336.

[0050] FIG. 40. Schematic diagram and nucleic acid sequence of 53337.

[0051] FIG. 41. Schematic diagram and nucleic acid sequence of 53338.

[0052] FIG. 42. Schematic diagram and nucleic acid sequence of 53340.

[0053] FIG. 43. Schematic diagram and nucleic acid sequence of 53955.

[0054] FIG. 44. Schematic diagram and nucleic acid sequence of 53367.

[0055] FIG. 45. Schematic diagram and nucleic acid sequence of 53504.

[0056] FIG. 46. Schematic diagram and nucleic acid sequence of 53510.

[0057] FIG. 47. Schematic diagram and nucleic acid sequence of 53515.

[0058] FIG. 48. Schematic diagram and nucleic acid sequence of 54567.

[0059] FIG. 49. Schematic diagram and nucleic acid sequence of 54568.

[0060] FIG. 50. Schematic diagram and nucleic acid sequence of 54569.

[0061] FIG. 51. Schematic diagram and nucleic acid sequence of 54570.

[0062] FIG. 52. Schematic diagram and nucleic acid sequence of 53956.

[0063] FIG. 53. Schematic diagram and nucleic acid sequence of 53957.

[0064] FIG. 54. Schematic diagram and nucleic acid sequence of 53967.

[0065] FIG. 55. Schematic diagram and nucleic acid sequence of 53329.

[0066] FIG. 56. Schematic diagram and nucleic acid sequence of 53330.

[0067] FIG. 57. Schematic diagram and nucleic acid sequence of 53331.

[0068] FIG. 58. Schematic diagram and nucleic acid sequence of 53503.

[0069] FIG. 59. Schematic diagram and nucleic acid sequence of 51490.

[0070] FIG. 60. Schematic diagram and nucleic acid sequence of 51491.

[0071] FIG. 61. Schematic diagram and nucleic acid sequence of 51492.

[0072] FIG. 62. Schematic diagram and nucleic acid sequence of 51493.

[0073] FIG. 63. Schematic diagram and nucleic acid sequence of 51494.

[0074] FIG. 64. Schematic diagram and nucleic acid sequence of 51495.

[0075] FIG. 65. Schematic diagram and nucleic acid sequence of 51497.

[0076] FIG. 66. Schematic diagram and nucleic acid sequence of 51498.

[0077] FIG. 67. Schematic diagram and nucleic acid sequence of 51499.

[0078] FIG. 68. Schematic diagram and nucleic acid sequence of 51804.

[0079] FIG. 69. Schematic diagram and nucleic acid sequence of 51805.

[0080] FIG. 70. Schematic diagram and nucleic acid sequence of 51803.

[0081] FIG. 71. Schematic diagram and nucleic acid sequence of 53335.

[0082] FIG. 72. Schematic diagram and nucleic acid sequence of 53336.

[0083] FIG. 73. Schematic diagram and nucleic acid sequence of 53337.

[0084] FIG. 74. Schematic diagram and nucleic acid sequence of 53505.

[0085] FIG. 75. Schematic diagram and nucleic acid sequence of 53508.

[0086] FIG. 76. Schematic diagram and nucleic acid sequence of 53323.

[0087] FIG. 77. Schematic diagram and nucleic acid sequence of 53344.

[0088] FIG. 78. Schematic diagram and nucleic acid sequence of 53346.

[0089] FIG. 79. Schematic diagram and nucleic acid sequence of 53353.

[0090] FIG. 80. Schematic diagram and nucleic acid sequence of 53355.

[0091] FIG. 81. Schematic diagram and nucleic acid sequence of 53356.

[0092] FIG. 82. Schematic diagram and nucleic acid sequence of 53358.

[0093] FIG. 83. Schematic diagram and nucleic acid sequence of 53501.

[0094] FIG. 84. Schematic diagram and nucleic acid sequence of 53502.

[0095] FIG. 85. Schematic diagram and nucleic acid sequence of 53506.

[0096] FIG. 86. Schematic diagram and nucleic acid sequence of 53508.

[0097] FIG. 87. Schematic diagram and nucleic acid sequence of 53511.

[0098] FIG. 88. Schematic diagram and nucleic acid sequence of 53512.

[0099] FIG. 89. Schematic diagram and nucleic acid sequence of 54671.

[0100] FIG. 90. Schematic diagram and nucleic acid sequence of 54672.

[0101] FIG. 91. Schematic diagram and nucleic acid sequence of 54673.

[0102] FIG. 92. Schematic diagram and nucleic acid sequence of 54675.

[0103] FIG. 93. Schematic diagram and nucleic acid sequence of 54678.

[0104] FIG. 94. Schematic diagram and nucleic acid sequence of 54679.

[0105] FIG. 95. Schematic diagram and nucleic acid sequence of 53500.

[0106] FIG. 96. Schematic diagram and nucleic acid sequence of 53509.

[0107] FIG. 97. Schematic diagram and nucleic acid sequence of 53513.

[0108] FIG. 98. Schematic diagram and nucleic acid sequence of 53514.

[0109] FIG. 99. Schematic diagram and nucleic acid sequence of 56382.

[0110] FIG. 100. Schematic diagram and nucleic acid sequence of 54580.

[0111] FIG. 101. Schematic diagram and nucleic acid sequence of 54581.

[0112] FIG. 102. Schematic diagram and nucleic acid sequence of 54582.

[0113] FIG. 103. Schematic diagram and nucleic acid sequence of 54583.

[0114] FIG. 104. Schematic diagram and nucleic acid sequence of 54680.

[0115] FIG. 105. Schematic diagram and nucleic acid sequence of 54681.

[0116] FIG. 106. Schematic diagram and nucleic acid sequence of 54682.

[0117] FIG. 107. Schematic diagram and nucleic acid sequence of 54563.

[0118] FIG. 108. Schematic diagram and nucleic acid sequence of 54564.

[0119] FIG. 109. Schematic diagram and nucleic acid sequence of 54565.

[0120] FIG. 110. Schematic diagram and nucleic acid sequence of 54566.

[0121] FIG. 111. Schematic diagram and nucleic acid sequence of 54670.

[0122] FIG. 112. Schematic diagram and nucleic acid sequence of 54676.

[0123] FIG. 113. Schematic diagram and nucleic acid sequence of 54677.

[0124] FIG. 114. Schematic diagram and nucleic acid sequence of 53957.

[0125] FIG. 115. Schematic diagram and nucleic acid sequence of 54510.

[0126] FIG. 116. Schematic diagram and nucleic acid sequence of 54671.

[0127] FIG. 117. Schematic diagram and nucleic acid sequence of 54672.

[0128] FIG. 118. Schematic diagram and nucleic acid sequence of 54675.

[0129] FIG. 119. Schematic diagram and nucleic acid sequence of 54678.

[0130] FIG. 120. Schematic diagram and nucleic acid sequence of 54679.

[0131] FIG. 121. Schematic diagram and nucleic acid sequence of 56383.

[0132] FIG. 122. Schematic diagram and nucleic acid sequence of 56384.

[0133] FIG. 123. Schematic diagram and nucleic acid sequence of 56478.

[0134] FIG. 124. Schematic diagram and nucleic acid sequence of 56479.

[0135] FIG. 125. Schematic diagram and nucleic acid sequence of VRC 7700.

[0136] FIG. 126. Schematic diagram and nucleic acid sequence of VRC 7710.

[0137] FIG. 127. Schematic diagram and nucleic acid sequence of VRC 7720.

[0138] FIG. 128. Schematic diagram and nucleic acid sequence of VRC 7730.

[0139] FIG. 129. Schematic diagram and nucleic acid sequence of VRC 7731.

[0140] FIG. 130. Schematic diagram and nucleic acid sequence of VRC 7732.

[0141] FIG. 131. Schematic diagram and nucleic acid sequence of VRC 7733.

[0142] FIG. 132. Schematic diagram and nucleic acid sequence of VRC 7734.

[0143] FIG. 133. Schematic diagram and nucleic acid sequence of VRC 7735.

[0144] FIG. 134. Schematic diagram and nucleic acid sequence of VRC 7742.

[0145] FIG. 135. Schematic diagram and nucleic acid sequence of VRC 7721.

[0146] FIG. 136. Schematic diagram and nucleic acid sequence of VRC 7743.

[0147] FIG. 137. Schematic diagram and nucleic acid sequence of VRC 7744.

[0148] FIG. 138. Schematic diagram and nucleic acid sequence of VRC 7745.

[0149] FIG. 139. Schematic diagram and nucleic acid sequence of VRC 7746.

[0150] FIG. 140. Schematic diagram and nucleic acid sequence of VRC 7747.

[0151] FIG. 141. Schematic diagram and nucleic acid sequence of VRC 7748.

[0152] FIG. 142. Schematic diagram and nucleic acid sequence of VRC 7749.

[0153] FIG. 143. Schematic diagram and nucleic acid sequence of VRC 7751.

[0154] FIG. 144. Schematic diagram and nucleic acid sequence of VRC 7752.

[0155] FIG. 145. Schematic diagram and nucleic acid sequence of VRC 7753.

[0156] FIG. 146. Schematic diagram and nucleic acid sequence of VRC 7754.

[0157] FIG. 147. Schematic diagram and nucleic acid sequence of VRC 7755.

[0158] FIG. 148. Schematic diagram and nucleic acid sequence of VRC 7757.

[0159] FIG. 149. Schematic diagram and nucleic acid sequence of VRC 7758.

[0160] FIG. 150. Schematic diagram and nucleic acid sequence of VRC 7759.

[0161] FIG. 151. A schematic diagram of the structure of the influenza A virus particle.

[0162] FIG. 152. Diagram of influenza A hemagglutinin (HA) protein.

[0163] FIG. 153. Diagram of influenza A nucleoprotein (NP); unconventional nuclear localization signal (NLS), (SEQ ID NO: 183), bipartite NLS, (SEQ ID NO: 184).

[0164] FIG. 154. Diagram of influenza A neuraminidase (NA) protein.

[0165] FIG. 155. Diagram of influenza A M2 protein.

[0166] FIG. 156. Expression of viral HAs; wild type, (SEQ ID NO: 151), H1(1918)ACS (SEQ ID NO: 152), H5ΔPS (SEQ ID NO: 153), and H5ΔPS2 (SEQ ID NO: 154).

[0167] FIG. 157. Humoral and cellular immune responses to 1918 influenza HA after DNA vaccination.

[0168] FIG. 158. Immune protection conferred against lethal challenge of 1918 influenza and lack of T cell dependence.

[0169] FIG. 159. Immune mechanism of protection showing dependence on Ig.

[0170] FIG. 160. Development of HA-pseudotyped lentiviral vectors.

[0171] FIG. 161. VRC 7720: CMV/R(8κb)Influenza H5(A/Thailand/1(KAN-1)/2004) HA/h, (SEQ ID NO: 161).

[0172] FIG. 162. VRC 7721: CMV/R(8κB)Influenza H5(A/Thailand/1(KAN-1)/2004) HA mutA/h, (SEQ ID NO: 162).

[0173] FIG. 163. VRC 7722: CMV/R 8κB Influenza A/New Caledonia/20/99(H1N1) wt, (SEQ ID NO: 163).

[0174] FIG. 164. VRC 7723 (VRC 7727): CMV/R 8κB Influenza A/New Caledonia/20/99(H1N1) mut a, (SEQ ID NO: 164).

[0175] FIG. 165. VRC 7724: CMV/R 8κB Influenza A/Wyoming/3/03 (H3N2)wt, (SEQ ID NO: 165).

[0176] FIG. 166. VRC 7725 (VRC 7729): CMV/R 8κB Influenza A/Wyoming/3/03 (H3N2) mut a, (SEQ ID NO: 166).

[0177] FIG. 167. Sequence alignment of CMV/R and CMV/R 8κB Promoters.

[0178] FIG. 168. Amino acid sequence alignment of VRC 7721 and VRC 7720 inserts.

[0179] FIG. 169. Intracellular flow cytometric analysis of gp145 env-specific CD4+ and CD8+ T-cell responses of immunized mice.

[0180] FIG. 170. End-point dilutions of antibody responses in mice vaccinated with wild-type CMV/R or CMV/R 8κb plasmid DNA expressing HIV gp145.

[0181] FIG. 171. Protective immunity to lethal H5N1 Influenza challenge in mice vaccinated with a CMV/R 8κB plasmid DNA vector expressing H5 Hemagglutinin.

[0182] FIG. 172. Schematic diagram of pseudotyped lentiviral reporter assay.

TABLE 1
Influenza HA constructs

| Construct | Construct Name/Description | SEQ ID NO | Figure |
|---|---|---|---|
| VRC 9123 | CMV/R Influenza A/Indonesia/05/05 (H5N1) HA-mut A | 1 | 1 |
| VRC 7702 | CMV/R Influenza H1(A/PR8/8/34) HA/h | 2 | 2 |
| VRC 7703 | CMV/R Influenza H1(A/PR8/8/34) HA (dPC-a)/h | 3 | 3 |
| VRC 7704 | CMV/R Influenza H1(A/PR8/8/34) HA (dPC-b)/h | 4 | 4 |
| VRC 7705 | CMV/R Influenza H5(A/Thailand/1(KAN-1)/2004) HA/h | 5 | 5 |
| VRC 7706 | CMV/R Influenza H5(A/Thailand/1(KAN-1)/2004) HA (dPC-a)/h | 6 | 6 |
| VRC 7707 | CMV/R Influenza H5(A/Thailand/1(KAN-1)/2004) HA (dPC-b)/h | 7 | 7 |
| VRC 7708 | CMV/R Influenza H5(A/Thailand/1(KAN-1)/2004) NA/h | 8 | 8 |
| VRC 7712 | CMV/R Influenza (A/PR8/8/34) M2(dTM)/h | 9 | 9 |
| VRC 7713 | CMV/R Influenza (A/PR8/8/34) TT-M2(dTM)/h | 10 | 10 |
| VRC 7714 | CMV/R Influenza (A/PR8/8/34) TT-M2/h | 11 | 11 |
| VRC 7715 | CMV/R Influenza (A/PR8/8/34) M2/h | 12 | 12 |
| VRC 7716 | CMV/R Influenza (A/Ck/Thailand/1/2004) M2(dTM)/h | 13 | 13 |
| VRC 7717 | CMV/R Influenza (A/Ck/Thailand/1/2004) TT-M2(dTM)/h | 14 | 14 |
| VRC 7718 | CMV/R Influenza (A/Ck/Thailand/1/2004) TT-M2/h | 15 | 15 |
| VRC 7719 | CMV/R Influenza (A/Ck/Thailand/1/2004) M2/h | 16 | 16 |
| 53349 | 053349pCMVR8x*/D90304-Foldon-His | 17 | 17 |
| 53350 | 053350pCMVR8x*/D90307-wt | 18 | 18 |
| 53352 | 053352pCMVR8x*/D90307-Foldon-His | 19 | 19 |
| 53353 | 053353pCMVR8x*/DQ009917-wt | 20 | 20 |
| 53355 | 053355pCMVR8x*/DQ009917-Foldon-His | 21 | 21 |
| 53356 | 053356pCMVR8x*/DQ080993-wt | 22 | 22 |
| 53358 | 053358pCMVR8x*/DQ080993-Foldon-His | 23 | 23 |
| 53359 | 053359pCMVR8x*/L43916-wt | 24 | 24 |
| 53361 | 053361pCMVR8x*/L43916-Foldon-His | 25 | 25 |
| 53362 | 053362pCMVR8x*/M21646-wt | 26 | 26 |
| 53364 | 053364pCMVR8x*/M21646-Foldon-His | 27 | 27 |
| 53365 | 053365pCMVR8x*/M35997-wt | 28 | 28 |
| 53367 | 053367pCMVR8x*/M35997-Foldon-His | 29 | 29 |
| 53320 | 053320pCMVR8x*/AAG17429-wt | 30 | 30 |
| 53322 | 053322pCMW8x*/AAG17429-Foldon-His | 31 | 31 |
| 53325 | 053325pCMVR8x*/AF028020-Foldon-His | 32 | 32 |
| 53326 | 053326pCMVR8x*/AJ404627-wt | 33 | 33 |
| 53328 | 053328pCMVR8x*/AJ404627-Foldon-His | 34 | 34 |
| 53331 | 053331pCMVR8x*/AY289929-Foldon-His | 35 | 35 |
| 53332 | 053332pCMVR8x*/AY338459-wt | 36 | 36 |
| 53334 | 053334pCMVR8x*/AY338459-Foldon-His | 37 | 37 |
| 53335 (8x) | 053335pCMVR8x*/AY531033-wt | 38 | 38 |
| 53336 (8x) | 053336pCMVR8x*/AY531033-mutant A | 39 | 39 |
| 53337 (8x) | 053337pCMVR8x*/AY531033-Foldon-His | 40 | 40 |
| 53338 | 053338pCMVR8x*/AY684886-wt | 41 | 41 |
| 53340 | 053340pCMVR8x*/AY684886-Foldon-His | 42 | 42 |
| 53955 | 053955pCMVR8x*/A/WS/33 (H1N1) HA-wt (U08904) | 43 | 43 |
| 53367 | 053367pCMVR8x*/M35997-Foldon-His | 44 | 44 |
| 53504 | 053504pAcGP67A/AY338459-Foldon-His | 45 | 45 |
| 53510 | 053510pAcGP67A/D90307-Foldon-His | 46 | 46 |
| 53515 | 053515pAcGP67A/M35997-Foldon-His 2 | 47 | 47 |
| 54567 | 054567pAcGP67A/A/Thailand/1(KAN-1)/2004 (H5N1) HA mutant A-long Foldon- | 48 | 48 |
| | His | | |
| 54568 | 054568pAcGP67A/A/Thailand/1 (KAN-1)/2004 (H5N1) HA-mutant A-short-Foldon- | 49 | 49 |
| | His | | |
| 54569 | 054569pAcGP67A/A/Thailand/1 (KAN-1)/2004 (H5N1) HA-mutant A-long-spacer- | 50 | 50 |
| | Foldon-His | | |
| 54570 | 054570pAcGP67A/A/Thailand/1 (KAN-1)/2004 (H5N1) HA-mutant A-short-spacer- | 51 | 51 |
| | Foldon-His | | |
| 53956 | 053956pCMV/R*/A/WS/33 (H1N1) HA-mutant A (U08904) | 52 | 52 |
| 53957 | 053957pCMV/R*/A/WS/33 (H1N1) HA-mutant A-Foldon-His (U08904) | 53 | 53 |
| 53967 | 053967pAcGP67A/A/WS/33 (H1N1) HA-mutant A-Foldon-His2 | 54 | 54 |
| 53329 | 053329pCMV/R*/AY289929-wt | 55 | 55 |
| 53330 | 053330pCMV/R*/AY289929-mutant A | 56 | 56 |
| 53331 | 053331pCMV/R*/AY289929-Foldon-His | 57 | 57 |
| 53503 | 053503pAcGP67A/AY289929-Foldon-His 2 | 58 | 58 |
| 51490 | 051490pPCR-Script/A/Hong Kong/156/97 (H5N1) HA-wt (AAC32088) | 59 | 59 |
| 51491 | 051491pPCR-Script/A/Hong Kong/156/97 (H5N1) HA-mutant A (AAC32088) | 60 | 60 |
| 51492 | 051492pPCR-Script/A/Hong Kong/156/97 (H5N1) HA-mutant A-Foldon-His | 61 | 61 |
| | (AAC32088) | | |
| 51493 | 051493pPCR-Script/A/Hong Kong/483/97 (H5N1) HA-wt (AAC32099.1) | 62 | 62 |
| 51494 | 051494pPCR-Script/A/Hong Kong/483/97 (H5N1) HA-mutant A (AAC32099.1) | 63 | 63 |
| 51495 | 051495pPCR-Script/A/Hong Kong/483/97 (H5N1) HA-mutant A-Foldon-His | 64 | 64 |
| | (AAC32099.1) | | |
| 51497 | 051497pPCR-Script/A/chicken/Korea/ES/03 (H5N1) HA-mutant A (AAV97603.1) | 65 | 65 |
| 51498 | 051498pPCR-Script/A/chicken/Korea/ES/03 (H5N1) HA-mutant A-Foldon-His | 66 | 66 |
| | (AAV97603.1) | | |
| 51499 | 051499pPCR-Script/Foldon-His-Tag | 67 | 67 |
| 51804 | 051804pPCR-Script/A/South Carolina/1/18 (H1N1) HA-mutant A (AF117241) | 68 | 68 |
| 51805 | 051805pPCR-Script/HA-mutant A-Foldon-His | 69 | 69 |
| 51803 | 051803pPCR-Script/HA-wt | 70 | 70 |
| 53335 (CMV/R) | 053335pCMV/R*/AY531033-wt | 71 | 71 |
| 53336 (CMV/R) | 053336pCMV/R*/AY531033-mutant A | 72 | 72 |
| 53337 (CMV/R) | 053337pCMV/R*/AY531033-Foldon-His | 73 | 73 |
| 53505 | 053505pAcGP67A/AY531033-Foldon-His 2 | 74 | 74 |
| 54508 | 054508pUC-kana/A/Thailand/1 (KAN-1)/2004 (H5N1) HA-mutant A-long-spacer- | 75 | 75 |
| | Foldon-His | | |
| 53323 | 053323pCMVR8x/AF028020-wt | 76 | 76 |
| 53344 | 053344pCMVR8x/ AY773907-wt | 77 | 77 |
| 53346 | 053346pCMVR8x/AY773907-Foldon-His | 78 | 78 |
| 53353 | 053353pCMVR8x/DQ009917-wt | 79 | 79 |
| 53355 | 053355pCMVR8x/DQ009917-Foldon-His | 80 | 80 |
| 53356 | 053356pCMVR8x/DQ080993-wt | 81 | 81 |
| 53358 | 053358pCMVR8x/DQ080993-Foldon-His | 82 | 82 |
| 53501 | 053501pAcGP67A/AF028020-Foldon-His | 83 | 83 |
| 53502 | 053502pAcGP67A/AJ404627-Foldon-His 2 | 84 | 84 |
| 53506 | 053506pAcGP67A/AY684886-Foldon-His 2 | 85 | 85 |
| 53508 | 053508pAcGP67A/AY773907-Foldon-His | 86 | 86 |
| 53511 | 053511pAcGP67A/DQ009917-Foldon-His | 87 | 87 |
| 53512 | 053512pAcGP67A/DQ080993-Foldon-His | 88 | 88 |
| 54671 | 054671pCMVR8x/AF028020-mutant A | 89 | 89 |
| 54672 | 054672pCMVR8x/AJ404627-mutant A | 90 | 90 |
| 54673 | 054673pCMVR8x/AY684886-mutant A | 91 | 91 |
| 54675 | 054675pCMVR8x/AY773907-mutant A | 92 | 92 |
| 54678 | 054678pCMVR8x/DQ009917-mutant A | 93 | 93 |
| 54679 | 054679pCMVR8x/DQ080993-mutant A | 94 | 94 |
| 53500 | 053500pAcGP67A/AAG17429-Foldon-His 2 | 95 | 95 |
| 53509 | 053509pAcGP67A/D90304-Foldon-His | 96 | 96 |
| 53513 | 053513pAcGP67A/L43916-Foldon-His | 97 | 97 |
| 53514 | 053514pAcGP67A/M21646-Foldon-His | 98 | 98 |
| 56382 | 056382pCMVR8x/A/Thailand/1 (KAN-1)/2004(H5N1) NP (AAV35112) | 99 | 99 |
| 54580 | 054580pAcGP67A/HA-mutant A-long-Foldon-His | 100 | 100 |
| 54581 | 054581pAcGP67A/HA-mutant A-short-Foldon-His | 101 | 101 |
| 54582 | 054582pAcGP67A/HA-mutant A-long-spacer-Foldon-His | 102 | 102 |
| 54583 | 054583pAcGP67A/HA-mutant A-short-spacer-Foldon-His | 103 | 103 |
| 54680 | 054680pCMVR8x*/L43916-mutant A | 104 | 104 |
| 54681 | 054681pCMVR8x*/M21646-mutant A | 105 | 105 |
| 54682 | 054682pCMVR8x*/M35997-mutant A | 106 | 106 |
| 54563 | 054563pCMVR8x*/A/Thailand/1 (KAN-1)/2004 (H5N1) HA-mutant A-long- | 107 | 107 |
| | Foldon-His | | |
| 54564 | 054564pCMVR8x*/A/Thailand/1 (KAN-1)/2004 (H5N1) HA-mutant A-short- | 108 | 108 |
| | Foldon-His | | |
| 54565 | 054565pCMVR8x*/A/Thailand/1 (KAN-1)/2004 (H5N1) HA-mutant A-long-spacer- | 109 | 109 |
| | Foldon-His | | |
| 54566 | 054566pCMVR8x*/A/Thailand/1 (KAN-1)/2004 (H5N1) HA-mutant-short-spacer- | 110 | 110 |
| | Foldon-His | | |
| 54670 | Q54670pCMVR8x*/AAG17429-mutant A | 111 | 111 |
| 54676 | 054676pCMVR8x*/D90304-mutant A | 112 | 112 |
| 54677 | 054677pCMVR8x*/D90307-mutant A | 113 | 113 |
| 53957 | 053957pCMVR8x*/A/WS/33 (H1N1) HA-mutant A-Foldon-His (U08904) | 114 | 114 |
| 54510 | 054510pCMVR8x*/A/Thailand/1 (KAN-1)/2004 (H5N1) HA-mutant A | 115 | 115 |
| 54671 | 054671pCMVR8x*/AF028020-mutant A | 116 | 116 |
| 54672 | 054672pCMVR8x*/AJ404627-mutant A | 117 | 117 |
| 54675 | 054675pCMVR8x*/AY773907-mutant A | 118 | 118 |
| 54678 | 056489pCMVR8x*/DQ009917-mutant A | 119 | 119 |
| 54679 | 054679pCMVR8x*/DQ080993-mutant A | 120 | 120 |
| 56383 | 056383pCMVR8x*/pR8(H1N1)-NPA aa (AAM75159) | 121 | 121 |
| 56384 | 056384pCMVR8x*/PR8(H1N1)-M2 aa (AAV41244) | 122 | 122 |
| 56478 | 056478pCMVR8x*/A/Brevig Mission/1/1918 (H1N1) NP (AAV48837) | 123 | 123 |
| 56479 | 056479pCMVR8x*/A/Thailand/1 (KAN-1)/2004 (H5N1) M2 (AAV35111) | 124 | 124 |
| VRC 7700 | pVR1012 INA-NP | 125 | 125 |
| VRC 7710 | pAdApt INA-NP | 126 | 126 |
| VRC 7720 | CMV/R (8κB) Influenza H5 (A/Thailand/1(KAN-1)/2004) HA/h | 127 | 127 |
| VRC 7730 | CMV/R 8κB Influenza A/South Carolina/1/18(H1N1) HA-wt | 128 | 128 |
| VRC 7731 | CMV/R 8κB Influenza A/South Carolina/1/18 (H1N1) HA-mut A | 129 | 129 |
| VRC 7732 | CMV/R 8κB Influenza A/South Carolina/1/18 (H1N1) HA mut A-long-Foldon-His | 130 | 130 |
| VRC 7733 | CMV/R 8κB Influenza A/South Carolina/1/18 (H1N1) HA mut A-short-Foldon-His | 131 | 131 |
| VRC 7734 | CMV/R 8κB Influenza A/South Carolina/1/18 (H1N1) HA mut A long-spacer- | 132 | 132 |
| | Foldon-His | | |
| VRC 7735 | CMV/R 8κB Influenza A/South Carolina/1/18 (H1N1) HA mut A short-spacer- | 133 | 133 |
| | Foldon-His | | |
| VRC 7742 | CMVR HI(A/PR8/8/34) HA mutA-short-Foldon-His | 134 | 134 |
| VRC 7721 | CMV/R 8κB Influenza H5 (A/Thailand/1(KAN-1)/2004) HA mut A/h | 135 | 135 |
| VRC 7743 | CMVR HI(A/PR8/8/34) HA mut A-long-Foldon-His | 136 | 136 |
| VRC 7744 | CMV/R Influenza A/Hong Kong/156/97 (H5N1) HA-wt | 137 | 137 |
| VRC 7745 | CMV/R Influenza A/Hong Kong/156/97 (H5N1) HA-mut A | 138 | 138 |
| VRC 7746 | CMV/R Influenza A/Hong Kong/156/97 (H5N1) HA-mut A-Foldon-His | 139 | 139 |
| VRC 7747 | CMV/R Influenza A/Hong Kong/483/97 (H5N1) HA-wt | 140 | 140 |
| VRC 7748 | CMV/R Influenza A/Hong Kong/483/97 (H5N1) HA-mut A | 141 | 141 |
| VRC 7749 | CMV/R Influenza A/Hong Kong/483/97 (H5N1) HA-mut A-Foldon-His | 142 | 142 |
| VRC 7751 | CMV/R Influenza A/chicken/Korea/ES/03(H5N1) HA-mut A | 143 | 143 |
| VRC 7752 | CMV/R Influenza A/chicken/Korea/ES/03(H5N1) HA-mut A-Foldon-His | 144 | 144 |
| VRC 7753 | CMV/R Influenza A/South Carolina/1/18 (H1N1) HA-wt | 145 | 145 |
| VRC 7754 | CMV/R Influenza A/South Carolina/1/18 (H1N1) HA-mut A | 146 | 146 |
| VRC 7755 | CMV/R Influenza A/South Carolina/1/18 (H1N1) HA-mut A-Foldon-His | 147 | 147 |
| VRC 7757 | CMV/R (8κB)-Influenza H1(A/PR8/8/34) HA (mut A)/h | 148 | 148 |
| VRC 7758 | CMV/R (8κB)-Influenza H1(A/PR8/8/34) HA/h | 149 | 149 |
| VRC 7759 | CMV/R (8κB)-Influenza H5 (A/Thailand/1(KAN-1)/2004) NA/h | 150 | 150 |

### DETAILED DESCRIPTION OF THE PREFERRED EMBODIMENT

### Part 1

### Influenza A

[0183] Influenza A is an enveloped negative single-stranded RNA virus that infects a wide range of avian and mammalian species. The influenza A viruses are classified into serologically-defined antigenic subtypes of the hemagglutinin (HA) and neuraminidase (NA) major surface glycoproteins (WHO Memorandum 1980 Bull WHO 58:585-591). The nomenclature meets the requirement for a simple system that can be used by all countries and it has been in effect since 1980. It is based on data derived from double immunodiffusion (DID) reactions involving hemagglutinin and neuraminidase antigens.

[0184] Double immunodiffusion (DID) tests are performed as described previously (Schild, GC et al. 1980 Arch Virol 63:171-184). Briefly, tests are carried out in agarose gels (HGT agarose, 1% phosphate-buffered saline, pH 7.2 containing 0.01 percent sodium azide). Preparations of purified virus particles containing 5-15 mg virus protein per ml (or an HA titer with chick erythrocytes of 10^{5.5}-10^{6.5} hemagglutinin units per 0.25 ml) are added in 5-10 μl volumes to wells in the gel. The virus particles are disrupted in the wells by the addition of sarcosyl detergent NL97, 1 percent final concentration). The precipitin reactions are either photographed without staining or, the gels are dried and stained with Coomassie Brilliant Blue.

[0185] The DID test, when performed using hyperimmune sera specific to one or other of the antigens, provides a valuable method for comparing antigenic relationships. Similarities between antigens are detected as lines of common precipitin, whereas the existence of variation between antigens is revealed by spurs of precipitin when different antigens are permitted to diffuse radically inwards toward a single serum. Based on the results of DID tests on influenza A viruses from all species, the H antigens can be grouped into 16 subtypes as indicated in Table 2).

TABLE 2
Hemagglutinin subtypes of influenza A viruses
isolated from humans, lower mammals and birds

| Sub- | Species of origin^{a} | | | |
|---|---|---|---|---|
| types | Humans | Swine | Horses | Birds |
| H1^{b} | PR/8/34 | Sw/Ia/15/30 | — | Dk/Alb/35/76 |
| H2 | Sing/1/57 | — | — | Dk/Ger/1215/73 |
| H3 | HK/1/68 | Sw/Taiwan/70 | Eq/Miami/1/63 | Dk/Ukr/1/63 |
| H4 | — | — | — | Dk/Cz/56 |
| H5 | — | — | — | Tern/S.A./61 |
| H6 | — | — | — | Ty/Mass/3740/65 |
| H7 | — | — | Eq/Prague/1/56 | FPV/Dutch/27 |
| H8 | — | — | — | Ty/Ont/6118/68 |
| H9 | — | — | — | Ty/Wis/1/66 |
| H10 | — | — | — | Ck/Ger/N/49 |
| H11 | — | — | — | Dk/Eng/56 |
| H12 | — | — | — | Dk/Alb/60/76 |
| H13 | — | — | — | Gull/MD/704/77 |
| H14 | — | — | — | Dk/Gurjev/263/82 |
| H15 | — | — | — | Dk/Austral/3431/83 |
| H16 | — | — | — | A/Black-headed |
| | | | | Gull/Sweden/5/99 |

^{a}The reference strains of influenza viruses, or the first isolates from that species, are presented.
^{b}Current subtype designation. From WHO Memorandum 1980 Bull WHO 58: 585-591.

[0186] The influenza A genome consists of eight single-stranded negative-sense RNA molecules (FIG. 151). Three types of integral membrane protein-hemagglutinin (HA), neuraminidase (NA), and small amounts of the M2 ion channel protein-are inserted through the lipid bilayer of the viral membrane. The virion matrix protein M1 is thought to underlie the lipid bilayer but also to interact with the helical ribonucleoproteins (RNPs). Within the envelope are eight segments of single-stranded genome RNA (ranging from 2341 to 890 nucleotides) contained in the form of an RNP. Associated with the RNPs are small amounts of the transcriptase complex, consisting of the proteins PB1, PB2, and PA. The coding assignments of the eight RNA segments are also illustrated in FIG. 151.

### Antigenic Shift and Drift

[0187] The segmentation of the influenza A genome facilitates reassortment among strains, when two or more strains infect the same cell. Reassortment can yield major genetic changes, referred to as antigenic shifts. In contrast, antigenic drift is the accumulation of viral strains with minor genetic changes, mainly amino acid substitutions in the HA and NA proteins. Influenza A nucleic acid replication by the virus-encoded RNA-dependent RNA polymerase complex is relatively error-prone, and these point mutations (˜1/10⁴ bases per replication cycle) in the RNA genome are the major source of genetic variation for antigenic drift.

[0188] Selection favors human influenza A strains with antigenic drift and shift involving the HA and NA proteins because these strains are able to evade neutralizing antibody from prior infection or vaccination. This selection allows viral reinfection with a new subtype (shift) or the same viral subtype (drift). Antigenic shifts caused three of the major influenza A pandemics in the twentieth century, including the 1918 H1N1 (Spanish flu), the 1957 H2N2 (Asian flu) and the 1968 H3N2 (Hong Kong flu) outbreaks. Antigenic drift accounts for the annual nature of flu epidemics. It also explains the reduced efficacy of influenza A vaccination, which is based on neutralizing antibody: For a particular subtype, if the amino acid sequence of the HA protein used in vaccination does not match that encountered during the epidemic, antibody neutralization may be ineffective.

### Hemagglutinin A

[0189] HA is encoded on a separate RNA molecule. HA is involved in viral attachment to terminal sialic acid residues on host cell glycoproteins and glycolipids. After viral entry into an acidic endosomal compartment of the cell, HA is also involved in fusion with the cell membrane, which results in the intracellular release of the virion contents. HA is synthesized as an HA₀ precursor that forms noncovalently bound homotrimers on the viral surface. The HA₀ precursor is cleaved by host proteases at a conserved arginine residue to creat two subunits, HA₁ and HA₂, which are associated by a single disulfide bond (FIG. 152). This cleavage event is required for productive infection.

[0190] HA is a critical determinant of the pathogenicity of avian influenza viruses, with a clear link between HA cleavability and virulence. The HA proteins of highly pathogenic H5 and H7 viruses contain multiple basic amino acid residues at the cleavage sites which are recognized by ubiquitous proteases, furin and PC6. For this reason, these viruses can cause systemic infections in poultry. Two groups of proteases are responsible for HA cleavage. The first group recognizes a single arginine and cleaves all HAs. Members of this group include plasmin, blood-clotting factor X-like proteases, tryptase Clara, miniplasmin, and bacterial proteases. The second group of proteases that cleaves HA proteins comprises the ubiquitous intracellular subtilisin-related endoproteases furin and PC6. These enzymes are calcium dependent, have an acidic pH optimum, and are located in the Golgi and/or trans-Golgi network.

[0191] The mature HA forms homotrimers. The crystallographic study of HA revealed the major features of the trimer structure: (a) a long fibrous stem that is comprised of a triple-stranded coiled coil of α-helices derived from the three HA2 parts of the molecule, and (b) the globular head, which is also comprised of three identical domains whose sequences are derived from the HA1 portions of the three monomers.

### Oligomerization Motifs

[0192] Several exogenous oligomerization motifs have been successfully used to promote stable trimers of soluble recombinant proteins: the GCN4 leucine zipper (Harbury et al. 1993 Science 262:1401-1407), the trimerization motif from the lung surfactant protein (Hoppe et al. 1994 FEBS Lett 344:191-195), collagen (McAlinden et al. 2003 J Biol Chem 278:42200-42207), and the phage T4 fibritin ‘foldon’ (Miroshnikov et al. 1998 Protein Eng 11:329-414). The fibritin foldon, a 27 amino acid sequence (GYIPEAPRDGQAYVRKDGEWVLLSTF, SEQ ID NO: 155), adopts a β-propeller conformation, and can fold and trimerize in an autonomous way (Tao et al. 1997 Structure 5:789-798). It has been reported recently that this foldon can successfully induce stable trimerization of other fibrous motifs such as phage T4 short-tail fibers and adenovirus fibers, as well as viral human immunodeficiency virus glycoprotein gp140.

### Nucleoprotein (NP)

[0193] The major viral protein in the ribonucleoprotein complex is the NP, which coats the RNA. A schematic representation of the influenza A NP is shown in FIG. 153. The relative positions of the nuclear localization signals (NLS) are indicated, and the amino acids critical for activity are shown in bold type. Additional NLS have been postulated. Investigators proposed that an NLS is located between amino acids 320 and 400 and that NP may contain a conformational NLS.

### Neuraminidase

[0194] NA is encoded on a separate RNA molecule. A schematic representation of the influenza A NA protein is shown in FIG. 154. NA cleaves terminal sialic acid residues of influenza A cellular receptors and is involved in the release and spread of mature virions. It may also contribute to initial viral entry. NA is the target of inhibitor drugs such as oseltamivir and zanamivir.

### M2 Protein

[0195] A single RNA segment encodes two matrix proteins, M1 and M2, which are generated by mRNA splicing. M1 is entirely internal and located immediately below the lipid bilayer of the virus. M2 serves as an ion channel that has a small extracellular surface domain. A schematic representation of the influenza A M2 protein is shown in FIG. 155. M2 is the target of the antiviral drugs amantidine and rimantidine.

### Types of Modifications

[0196] Described herein are modified influenza HA proteins that improve the immune response to native HA and expose the core protein for optimal antigen presentation and recognition. Weissenhom et al., 1998 Molecular Cell 2:605-616 proposes a core protein as a model for a fusion intermediate of viral glycoproteins, where the glycoproteins are characterized by a central triple stranded coiled coil followed by a disulfide-bonded loop that reverses the chain direction and connects to an α helix packed antiparallel to the core helices, as, for example, in the case of Ebola Zaire GP2, Murine Moloney Leukemia virus (MuMoLv) 55-residue segment of the TM subunit (Mo-55), low-pH-treated influenza HA2, protease resistant core of HIV gp41, and SIV gp41. Thus, the strategy for improving the immune response by exposing the protease resistant core embraces HA2 as a viral membrane fusion protein that is characterized by a central triple stranded coiled coil followed by a disulfide-bonded loop that reverses the chain direction and connects to an α helix packed antiparallel to the core helices.

[0197] To develop influenza variants that might effectively induce humoral and cellular immunity, a series of plasmid expression vectors were generated. Influenza proteins are encoded by nucleic acid sequences that contain RNA structures that may limit gene expression. These vectors were therefore synthesized using codons found in human genes that allow these structures to be eliminated without affecting the amino acid sequence.

[0198] To alter HA immunogenicity, an internal deletion was designed to stabilize and expose functional domains of the protein that might be present in an extended helical structure prior to the formation of the six-member coiled-coil structure in the hairpin intermediate (Weissenhom W et al. 1997 Nature 387:426-430). To generate this putative pre-hairpin structure, the cleavage site was removed to prevent the proteolytic processing of HA and stabilize the protein by linking HA1 covalently to HA2. These deletions were introduced into full-length and COOH-terminal truncation mutants.

[0199] The ability of these influenza proteins to elicit an immune response was determined in mice by injection with these plasmid DNA expression vectors. Antibody responses were monitored by the microneutralization assay and viral pseudotype assay.

[0200] To determine whether these modifications adversely affected CTL responses, vaccinated animals were tested for an increase in antigen-specific CD4 and CD8 T cells, as determined by intracellular cytokine staining to measure cells synthesizing either IFN-γ or TNF-α.

[0201] The HA gene of human influenza viruses contains multiple basic amino acid residues at the HA1/HA2 cleavage site similar to that seen in highly pathogenic avian influenza viruses. One component of our vaccine design was to delete this stretch of basic amino acids and to convert the HA to a low-pathogenic form without alteration of its antigenicity. The HA genes of wild type isolates were modified at the cDNA level so that the first five basic amino acid residues present in the cleavage site of wild type virus HA were deleted. In addition, a threonine residue was added proximal to the cleavage site to resemble that found in low-pathogenic avian strains (e.g., FIG. 168). This mutation is denoted HA (dPC-a), HA mut A or mutant A.

[0202] In some embodiments denoted “short” HA genes, we truncated the carboxy end (trans-membrane) part of the HA protein. The short HA version is truncated 10 amino acids upstream from the trans-membrane region.

[0203] In other embodiments, denoted “long” HA genes, we also truncated the carboxy end (trans-membrane) part of the HA protein. Long HA genes have ten (10) more amino acids than the corresponding short versions. The long version is truncated right before the trans-membrane region of the HA. Long HA constructs contain ten more amino acids upstream of the trans-membrane region of HA than that of the short HA version.

[0204] Some embodiments of the invention also have a “spacer”. The same spacer sequence is always used: When extra functional regions (e.g., Foldon domain, His Tag, etc.) are added to any naturally existing protein (e.g., HA), extra amino acids may be added between the regions to provide extra physical space, commonly called a spacer. The spacer is mainly for different functional regions to properly fold to their functional structural motifs without hindering each others' region.

[0205] Some embodiments denoted TT-M2(dTM) gene encode an influenza matrix 2 gene that has a transmembrane deletion.

[0206] Other embodiments denoted /h contain an influenza gene that is codon optimized for humans.

[0207] Some embodiments are denoted “Foldon-His”. In order to obtain the HA protein in its more native form, a foldon region is added to help the HA protein monomers to form the native trimer molecule. The His region acts as a tag for identification purposes of the HA protein and facilitates isolation of the HA protein by using anti-His antibodies, such as by the use of anti-His column chromatography.

### Part 2

### Definitions

[0208] Unless defined otherwise, technical and scientific terms used herein have the same meaning as commonly understood by one of ordinary skill in the art to which this invention belongs. See, e.g., Singleton P and Sainsbury D., in Dictionary of Microbiology and Molecular Biology 3rd ed., J. Wiley & Sons, Chichester, N.Y., 2001; and Fields Virology 5th ed., Knipe D. M. and Howley P. M. eds, Lippincott Williams & Wilkins, a Wolters Kluwer Business, Philadelphia 2007.

[0209] The transitional term “comprising” is synonymous with “including,” “containing,” or “characterized by,” is inclusive or open-ended and does not exclude additional, unrecited elements or method steps.

[0210] The transitional phrase “consisting of” excludes any element, step, or ingredient not specified in the claim, but does not exclude additional components or steps that are unrelated to the invention such as impurities ordinarily associated therewith.

[0211] The transitional phrase “consisting essentially of” limits the scope of a claim to the specified materials or steps and those that do not materially affect the basic and novel characteristic(s) of the claimed invention.

### Nucleic Acid Molecules

[0212] As indicated herein, nucleic acid molecules of the present invention may be in the form of RNA or in the form of DNA obtained by cloning or produced synthetically. The DNA may be double-stranded or single-stranded. Single-stranded DNA or RNA may be the coding strand, also known as the sense strand, or it may be the non-coding strand, also referred to as the anti-sense strand.

[0213] By “isolated” nucleic acid molecule(s) is intended a nucleic acid molecule, DNA or RNA, which has been removed from its native environment. For example, recombinant DNA molecules contained in a vector are considered isolated for the purposes of the present invention. Further examples of isolated DNA molecules include recombinant DNA molecules maintained in heterologous host cells or purified (partially or substantially) DNA molecules in solution. Isolated RNA molecules include in vivo or in vitro RNA transcripts of the DNA molecules of the present invention. Isolated nucleic acid molecules according to the present invention further include such molecules produced synthetically.

[0214] Nucleic acid molecules of the present invention include DNA molecules comprising an open reading frame (ORF), also termed “insert”, of a wild-type influenza gene; and DNA molecules which comprise a sequence substantially different from those described above but which, due to the degeneracy of the genetic code, still encode an ORF of a wild-type influenza polypeptide. Of course, the genetic code is well known in the art. Degenerate variants optimized for human codon usage are preferred

[0215] In another aspect, the invention provides a nucleic acid molecule comprising a polynucleotide which hybridizes under stringent hybridization conditions to a portion of the polynucleotide in a nucleic acid molecule of the invention described above. By “stringent hybridization conditions” is intended overnight incubation at 42° C. in a solution comprising: 50% formamide, 5 times SSC (750 mM NaCl, 75 mM trisodium citrate), 50 mM sodium phosphate (pH 7.6), 5 times Denhardt's solution, 10% dextran sulfate, and 20 μg/ml denatured, sheared salmon sperm DNA, followed by washing the filters in 0.1 times SSC at about 65° C.

[0216] By a polynucleotide which hybridizes to a “portion” of a polynucleotide is intended a polynucleotide (either DNA or RNA) hybridizing to at least about 15 nucleotides (nt), and more preferably at least about 20 nt, still more preferably at least about 30 nt, and even more preferably about 30-70 nt of the reference polynucleotide.

[0217] By a portion of a polynucleotide of “at least 20 nt in length,” for example, is intended 20 or more contiguous nucleotides from the nucleotide sequence of the reference polynucleotide. Of course, a polynucleotide which hybridizes only to a complementary stretch of T (or U) resides, would not be included in a polynucleotide of the invention used to hybridize to a portion of a nucleic acid of the invention, since such a polynucleotide would hybridize to any nucleic acid molecule containing a poly T (or U) stretch or the complement thereof (e.g., practically any double-stranded DNA clone).

[0218] As indicated herein, nucleic acid molecules of the present invention which encode an influenza polypeptide may include, but are not limited to those encoding the amino acid sequence of the full-length polypeptide, by itself, the coding sequence for the full-length polypeptide and additional sequences, such as those encoding a leader or secretory sequence, such as a pre-, or pro- or prepro-protein sequence, the coding sequence of the full-length polypeptide, with or without the aforementioned additional coding sequences, together with additional, non-coding sequences, including for example, but not limited to introns and non-coding 5′ and 3′ sequences, such as the transcribed, non-translated sequences that play a role in transcription, mRNA processing, including splicing and polyadenylation signals, for example, ribosome binding and stability of mRNA; and additional coding sequence which codes for additional amino acids, such as those which provide additional functionalities.

[0219] The present invention further relates to variants of the nucleic acid molecules of the present invention, which encode portions, analogs or derivatives of the influenza protein. Variants may occur naturally, such as a natural allelic variant. By an “allelic variant” is intended one of several alternate forms of a gene occupying a given locus on a genome of an organism (Genes II, Lewin, B., ed., John Wiley & Sons, New York (1985)). Non-naturally occurring variants may be produced using art-known mutagenesis techniques.

[0220] Such variants include those produced by nucleotide substitutions, deletions or additions, which may involve one or more nucleotides. The variants may be altered in coding regions, non-coding regions, or both: Alterations in the coding regions may produce conservative or non-conservative amino acid substitutions, deletions or additions. Especially preferred among these are silent substitutions, additions and deletions, which do not alter the properties and activities of the influenza polypeptide or portions thereof. Also especially preferred in this regard are conservative substitutions.

[0221] Further embodiments of the invention include nucleic acid molecules comprising a polynucleotide having a nucleotide sequence at least 95% identical, and more preferably at least 96%, 97%, 98% or 99% identical to a nucleotide sequence encoding a polypeptide having the amino acid sequence of a wild-type influenza polypeptide or a nucleotide sequence complementary thereto.

[0222] By a polynucleotide having a nucleotide sequence at least, for example, 95% “identical” to a reference nucleotide sequence encoding an influenza polypeptide is intended that the nucleotide sequence of the polynucleotide is identical to the reference sequence except that the polynucleotide sequence may include up to five point mutations per each 100 nucleotides of the reference nucleotide sequence encoding the influenza polypeptide. In other words, to obtain a polynucleotide having a nucleotide sequence at least 95% identical to a reference nucleotide sequence, up to 5% of the nucleotides in the reference sequence may be deleted or substituted with another nucleotide, or a number of nucleotides up to 5% of the total nucleotides in the reference sequence may be inserted into the reference sequence. These mutations of the reference sequence may occur at the 5′ or 3′ terminal positions of the reference nucleotide sequence or anywhere between those terminal positions, interspersed either individually among nucleotides in the reference sequence or in one or more contiguous groups within the reference sequence.

[0223] As a practical matter, whether any particular nucleic acid molecule is at least 95%, 96%, 97%, 98% or 99% identical to the reference nucleotide sequence can be determined conventionally using known computer programs such as the Bestfit program (Wisconsin Sequence Analysis Package, Version 8 for Unix, Genetics Computer Group, University Research Park, 575 Science Drive, Madison, Wis. 53711). Bestfit uses the local homology algorithm of Smith and Waterman, 1981 Advances in Applied Mathematics 2:482-489, to find the best segment of homology between two sequences. When using Bestfit or any other sequence alignment program to determine whether a particular sequence is, for instance, 95% identical to a reference sequence according to the present invention, the parameters are set, of course, such that the percentage of identity is calculated over the full length of the reference nucleotide sequence and that gaps in homology of up to 5% of the total number of nucleotides in the reference sequence are allowed.

[0224] The present application is directed to nucleic acid molecules at least 95%, 96%, 97%, 98% or 99% identical to the nucleic acid sequences shown herein in the Sequence Listing which encode a polypeptide having influenza polypeptide activity. By “a polypeptide having influenza activity” is intended polypeptides exhibiting influenza activity in a particular biological assay. For example, HA, NA, NP and M2 protein activity can be measured for changes in immunological character by an appropriate immunological assay.

[0225] Of course, due to the degeneracy of the genetic code, one of ordinary skill in the art will immediately recognize that a large number of the nucleic acid molecules having a sequence at least 95%, 96%, 97%, 98%, or 99% identical to a nucleic acid sequence shown herein in the Sequence Listing will encode a polypeptide “having influenza polypeptide activity.” In fact, since degenerate variants of these nucleotide sequences all encode the same polypeptide, this will be clear to the skilled artisan even without performing the above described comparison assay. It will be further recognized in the art that, for such nucleic acid molecules that are not degenerate variants, a reasonable number will also encode a polypeptide having influenza polypeptide activity. This is because the skilled artisan is fully aware of amino acid substitutions that are either less likely or not likely to significantly affect protein function (e.g., replacing one aliphatic amino acid with a second aliphatic amino acid).

[0226] For example, guidance concerning how to make phenotypically silent amino acid substitutions is provided in Bowie, J. U. et al. 1990 Science 247:1306-1310, wherein the authors indicate that proteins are surprisingly tolerant of amino acid substitutions.

### Polypeptides and Fragments

[0227] The invention further provides an influenza polypeptide having the amino acid sequence encoded by an open reading frame (ORF), also termed “insert”, of a wild-type influenza gene, or a peptide or polypeptide comprising a portion thereof (e.g., HA, NA, NP and M2).

[0228] It will be recognized in the art that some amino acid sequences of the influenza polypeptides can be varied without significant effect of the structure or function of the protein. If such differences in sequence are contemplated, it should be remembered that there will be critical areas on the protein which determine activity.

[0229] Thus, the invention further includes variations of the influenza polypeptides which show substantial influenza polypeptide activity or which include regions of influenza proteins such as the protein portions discussed below. Such mutants include deletions, insertions, inversions, repeats, and type substitutions. As indicated, guidance concerning which amino acid changes are likely to be phenotypically silent can be found in Bowie, J. U., et al. 1990 Science 247:1306-1310.

[0230] Thus, the fragment, derivative or analog of the polypeptide of the invention may be (i) one in which one or more of the amino acid residues are substituted with a conserved or non-conserved amino acid residue (preferably a conserved amino acid residue) and such substituted amino acid residue may or may not be one encoded by the genetic code, or (ii) one in which one or more of the amino acid residues includes a substituent group, or (iii) one in which additional amino acids are fused to the mature polypeptide, such as an IgG Fc fusion region peptide or leader or secretory sequence or a sequence which is employed for purification of the mature polypeptide or a proprotein sequence. Such fragments, derivatives and analogs are deemed to be within the scope of those skilled in the art from the teachings herein.

[0231] As indicated, changes are preferably of a minor nature, such as conservative amino acid substitutions that do not significantly affect the folding or activity of the protein (see Table 3).

TABLE 3
Conservative Amino Acid Substitutions

| | |
|---|---|
| Aromatic | Phenylalanine |
| | Tryptophan |
| | Tyrosine |
| Ionizable: Acidic | Aspartic Acid |
| | Glutamic Acid |
| Ionizable: Basic | Arginine |
| | Histidine |
| | Lysine |
| Nonionizable Polar | Asparagine |
| | Glutamine |
| | Selenocystine |
| | Serine |
| | Threonine |
| Nonpolar (Hydrophobic) | Alanine |
| | Glycine |
| | Isoleucine |
| | Leucine |
| | Proline |
| | Valine |
| Sulfur Containing | Cysteine |
| | Methionine |

[0232] Of course, the number of amino acid substitutions a skilled artisan would make depends on many factors, including those described above. Generally speaking, the number of amino acid substitutions for any given influenza polypeptide will not be more than 50, 40, 30, 20, 10, 5 or 3.

[0233] Amino acids in the influenza polypeptides of the present invention that are essential for function can be identified by methods known in the art, such as site-directed mutagenesis or alanine-scanning mutagenesis (Cunningham and Wells, 1989 Science 244:1081-1085). The latter procedure introduces single alanine mutations at every residue in the molecule. The resulting mutant molecules are then tested for biological activity such as changes in immunological character.

[0234] The polypeptides of the present invention are conveniently provided in an isolated form. By “isolated polypeptide” is intended a polypeptide removed from its native environment. Thus, a polypeptide produced and/or contained within a recombinant host cell is considered isolated for purposes of the present invention.

[0235] Also intended as an “isolated polypeptide” are polypeptides that have been purified, partially or substantially, from a recombinant host cell or a native source. For example, a recombinantly produced version of the influenza polypeptide can be substantially purified by the one-step method described in Smith and Johnson, 1988 Gene 67:31-40.

[0236] The polypeptides of the present invention include a polypeptide comprising a polypeptide encoded by a nucleic acid sequence shown herein in the Sequence Listing; as well as polypeptides which are at least 95% identical, and more preferably at least 96%, 97%, 98% or 99% identical to those described above and also include portions of such polypeptides with at least 30 amino acids and more preferably at least 50 amino acids.

[0237] By a polypeptide having an amino acid sequence at least, for example, 95% “identical” to a reference amino acid sequence of an influenza polypeptide is intended that the amino acid sequence of the polypeptide is identical to the reference sequence except that the polypeptide sequence may include up to five amino acid alterations per each 100 amino acids of the reference amino acid of the influenza polypeptide. In other words, to obtain a polypeptide having an amino acid sequence at least 95% identical to a reference amino acid sequence, up to 5% of the amino acid residues in the reference sequence may be deleted or substituted with another amino acid, or a number of amino acids up to 5% of the total amino acid residues in the reference sequence may be inserted into the reference sequence. These alterations of the reference sequence may occur at the amino or carboxy terminal positions of the reference amino acid sequence or anywhere between those terminal positions, interspersed either individually among residues in the reference sequence or in one or more contiguous groups within the reference sequence.

[0238] As a practical matter, whether any particular polypeptide is at least 95%, 96%, 97%, 98% or 99% identical to, for instance, the amino acid sequence encoded by a nucleic acid sequence shown herein in the Sequence Listing can be determined conventionally using known computer programs such the Bestfit program (Wisconsin Sequence Analysis Package, Version 8 for Unix, Genetics Computer Group, University Research Park, 575 Science Drive, Madison, Wis. 53711). When using Bestfit or any other sequence alignment program to determine whether a particular sequence is, for instance, 95% identical to a reference sequence according to the present invention, the parameters are set, of course, such that the percentage of identity is calculated over the fill length of the reference amino acid sequence and that gaps in homology of up to 5% of the total number of amino acid residues in the reference sequence are allowed.

[0239] The polypeptides of the invention may be produced by any conventional means. Houghten, R. A. 1985 Proc Natl Acad Sci USA 82:5131-5135. This “Simultaneous Multiple Peptide Synthesis (SMPS)” process is further described in U.S. Pat. No. 4,631,211 to Houghten et al (1986).

[0240] The present invention also relates to vectors which include the nucleic acid molecules of the present invention, host cells which are genetically engineered with the recombinant vectors, and the production of influenza polypeptides or fragments thereof by recombinant techniques.

[0241] The polynucleotides may be joined to a vector, which serves as a “backbone”, containing a selectable marker for propagation in a host. Generally, a plasmid vector is introduced in a precipitate, such as a calcium phosphate precipitate, or in a complex with a charged lipid. If the vector is a virus, it may be packaged in vitro using an appropriate packaging cell line and then transduced into host cells.

[0242] The DNA insert should be operatively linked to an appropriate promoter, such as the phage lambda PL promoter, the E. coli lac, trp and tac promoters, the SV40 early and late promoters and promoters of retroviral LTRs and cytomegalovirus (CMV) such as the CMV immediate early promoter, to name a few. Other suitable promoters will be known to the skilled artisan. The expression constructs will further contain sites for transcription initiation, termination and, in the transcribed region, a ribosome binding site for translation The coding portion of the mature transcripts expressed by the constructs will preferably include a translation initiating at the beginning and a termination codon (UAA, UGA or UAG) appropriately positioned at the end of the polypeptide to be translated.

[0243] As indicated, the expression vectors will preferably include at least one selectable marker. Such markers include dihydrofolate reductase or neomycin resistance for eukaryotic cell culture and tetracycline or ampicillin resistance genes for culturing in E. coli and other bacteria. Representative examples of appropriate hosts include, but are not limited to, bacterial cells, such as E. coli, Streptomyces and Salmonella typhimurium cells; fungal cells, such as yeast cells; insect cells such as Drosophila S2 and Spodoptera Sf9 cells; animal cells such as CHO, COS and Bowes melanoma cells; and plant cells. Appropriate culture mediums and conditions for the above-described host cells are known in the art.

[0244] Among vectors preferred for use in bacteria include pQE70, pQE60 and pQE-9, available from Qiagen; pBS vectors, Phagescript vectors, Bluescript vectors, pNH8A, pNH16a, pNH18A, pNH46A, available from Stratagene; and ptrc99a, pKK223-3, pKK233-3, pDR540, pRIT5 available from Pharmacia. Among preferred eukaryotic vectors are pWLNEO, pSV2CAT, pOG44, pXT1 and pSG available from Stratagene; and pSVK3, pBPV, pMSG and pSVL available from Pharmacia Other suitable vectors will be readily apparent to the skilled artisan.

[0245] Introduction of the construct into the host cell can be effected by calcium phosphate transfection, DEAE-dextran mediated transfection, cationic lipid-mediated transfection, electroporation, transduction, infection or other methods. Such methods are described in many standard laboratory manuals, such as Davis et al., Basic Methods In Molecular Biology (1986).

[0246] The influenza polypeptides can be recovered and purified from recombinant cell cultures by well-known methods including ammonium sulfate or ethanol precipitation, acid extraction, anion or cation exchange chromatography, phosphocellulose chromatography, hydrophobic interaction chromatography, affinity chromatography, hydroxylapatite chromatography and lectin chromatography. Most preferably, high performance liquid chromatography (“HPLC”) is employed for purification. Polypeptides of the present invention include naturally purified products, products of chemical synthetic procedures, and products produced by recombinant techniques from a prokaryotic or eukaryotic host, including, for example, bacterial, yeast, higher plant, insect and mammalian cells. Depending upon the host employed in a recombinant production procedure, the polypeptides of the present invention may be glycosylated or may be non-glycosylated. In addition, polypeptides of the invention may also include an initial modified methionine residue, in some cases as a result of host-mediated processes.

### Pharmaceutical Formulations, Dosages, and Modes of Administration

[0247] The compounds of the invention may be administered using techniques well known to those in the art. Preferably, compounds are formulated and administered by genetic immunization. Techniques for formulation and administration may be found in “Remington's Pharmaceutical Sciences”, 18^{th} ed., 1990, Mack Publishing Co., Easton, Pa. Suitable routes may include parenteral delivery, such as intramuscular, intradermal, subcutaneous, intramedullary injections, as well as, intrathecal, direct intraventricular, intravenous, intraperitoneal, intranasal, or intraocular injections, just to name a few. For injection, the compounds of the invention may be formulated in aqueous solutions, preferably in physiologically compatible buffers such as Hanks' solution, Ringer's solution, or physiological saline buffer.

[0248] In instances wherein intracellular administration of the compounds of the invention is preferred, techniques well known to those of ordinary skill in the art may be utilized. For example, such compounds may be encapsulated into liposomes, then administered as described above. Liposomes are spherical lipid bilayers with aqueous interiors. All molecules present in an aqueous solution at the time of liposome formation are incorporated into the aqueous interior. The liposomal contents are both protected from the external microenvironment and, because liposomes fuse with cell membranes, are effectively delivered into the cell cytoplasm.

[0249] Nucleotide sequences of the invention which are to be intracellularly administered may be expressed in cells of interest, using techniques well known to those of skill in the art. For example, expression vectors derived from viruses such as retroviruses, adenoviruses, adeno-associated viruses, herpes viruses, vaccinia viruses, polio viruses, or sindbis or other RNA viruses, or from plasmids may be used for delivery and expression of such nucleotide sequences into the targeted cell population. Methods for the construction of such expression vectors are well known. See, for example, Molecular Cloning: a Laboratory Manual, 3^{rd} edition, Sambrook et al. 2001 Cold Spring Harbor Laboratory Press, and Current Protocols in Molecular Biology, Ausubel et al. eds., John Wiley & Sons, 1994.

[0250] The invention extends to the use of a plasmid for primary immunization (priming) of a host and the subsequent use of a recombinant virus, such as a retrovirus, adenovirus, adeno-associated virus, herpes virus, vaccinia virus, polio virus, or sindbis or other RNA virus, for boosting said host, and vice versa. For example, the host may be immunized (primed) with a plasmid by DNA immunization and receive a boost with the corresponding viral construct, and vice versa. Alternatively, the host may be immunized (primed) with a plasmid by DNA immunization and receive a boost with not the corresponding viral construct but a different viral construct, and vice versa.

[0251] With respect to influenza virus HA, NA, NP and M2, protein sequences of the invention, they may be used as therapeutics or prophylatics (as subunit vaccines) in the treatment of influenza virus infection. A therapeutically effective dose refers to that amount of the compound sufficient to result in amelioration of symptoms or a prolongation of survival in a patient. Toxicity and therapeutic efficacy of such compounds can be determined by standard pharmaceutical procedures in cell cultures or experimental animals, e.g., for determining the LD50 (the dose lethal to 50% of the population) and the ED50 (the dose therapeutically effective in 50% of the population). The dose ratio between toxic and therapeutic effects is the therapeutic index and it can be expressed as the ratio LD50ED50. Compounds which exhibit large therapeutic indices are preferred. The data obtained from cell culture assays and animal studies can be used in formulating a range of dosage for use in humans. The dosage of such compounds lies preferably within a range of circulating concentrations that includes the ED50 with little or no toxicity. The dosage may vary within this range depending upon the dosage form employed and the route of administration utilized. For any compound used in the method of the invention, the therapeutically effective dose can be estimated initially from cell culture assays. A dose may be formulated in animal models to achieve a circulating plasma concentration range that includes the IC50 (e.g., the concentration of the test compound which achieves a half-maximal inhibition of viral infection relative to the amount of the event in the absence of the test compound) as determined in cell culture. Such information can be used to more accurately determine useful doses in humans. Levels in plasma may be measured, for example, by high performance liquid chromatography (HPLC).

[0252] The compounds of the invention may, further, serve the role of a prophylactic vaccine, wherein the host produces antibodies and/or CTL responses against influenza virus HA, NA, NP or M2 protein, which responses then preferably serve to neutralize influenza viruses by, for example, inhibiting further influenza infection. Administration of the compounds of the invention as a prophylactic vaccine, therefore, would comprise administering to a host a concentration of compounds effective in raising an immune response which is sufficient to elicit antibody and/or CTL responses to influenza virus HA, NA, NP or M2 protein, and/or neutralize an influenza virus, by, for example, inhibiting the ability of the virus to infect cells. The exact concentration will depend upon the specific compound to be administered, but may be determined by using standard techniques for assaying the development of an immune response which are well known to those of ordinary skill in the art.

[0253] The compounds may be formulated with a suitable adjuvant in order to enhance the immunological response. Such adjuvants may include, but are not limited to mineral gels such as aluminum hydroxide; surface active substances such as lysolecithin, pluronic polyols, polyanions; other peptides; oil emulsions; and potentially useful human adjuvants such as BCG and Corynebacterium parvum.

[0254] Adjuvants suitable for co-administration in accordance with the present invention should be ones that are potentially safe, well tolerated and effective in people including QS-21, Detox-PC, MPL-SE, MoGM-CSF, TiterMax-G, CRL-1005, GERBU, TERamide, PSC97B, Adjumer, PG-026, GSK-1, GcMAF, B-alethine, MPC-026, Adjuvax, CpG ODN, Betafectin, Alum, and MF59 (see Kim et al., 2000, Vaccine, 18: 597 and references therein).

[0255] Other contemplated adjuvants that may be administered include lectins, growth factors, cytokines and lymphokines such as alpha-interferon, gamma-interferon, platelet derived growth factor (PDGF), gCSF, GMCSF, TNF, epidermal growth factor (EGF), IL-1, IL-2, IL-4, IL-6, IL-8, IL-10 and IL-12.

[0256] For all such treatments described above, the exact formulation, route of administration and dosage can be chosen by the individual physician in view of the patient's condition. (See e.g., Fingl et al., 1975, in “The Pharmacological Basis of Therapeutics”, Ch. 1 p. 1).

[0257] It should be noted that the attending physician would know how to and when to terminate, interrupt, or adjust administration due to toxicity, or to organ dysfunctions. Conversely, the attending physician would also know to adjust treatment to higher levels if the clinical response were not adequate (precluding toxicity). The magnitude of an administered dose in the management of the viral infection of interest will vary with the severity of the condition to be treated and the route of administration. The dose and perhaps prime-boost regimen, will also vary according to the age, weight, and response of the individual patient. A program comparable to that discussed above may be used in veterinary medicine.

[0258] The pharmacologically active compounds of this invention can be processed in accordance with conventional methods of galenic pharmacy to produce medicinal agents for administration to patients, e.g., mammals including humans.

[0259] The compounds of this invention can be employed in admixture with conventional excipients, i.e., pharmaceutically acceptable organic or inorganic carrier substances suitable for parenteral, enteral (e.g., oral) or topical application which do not deleteriously react with the active compounds. Suitable pharmaceutically acceptable carriers include but are not limited to water, salt solutions, alcohols, gum arabic, vegetable oils, benzyl alcohols, polyethylene glycols, gelatine, carbohydrates such as lactose, amylose or starch, magnesium stearate, talc, silicic acid, viscous paraffin, perfume oil, fatty acid monoglycerides and diglycerides, pentaerythritol fatty acid esters, hydroxy methylcellulose, polyvinyl pyrrolidone, etc. The pharmaceutical preparations can be sterilized and if desired mixed with auxiliary agents, e.g., lubricants, preservatives, stabilizers, wetting agents, emulsifiers, salts for influencing osmotic pressure, buffers, coloring, flavoring and/or aromatic substances and the like which do not deleteriously react with the active compounds. They can also be combined where desired with other active agents, e.g., vitamins.

[0260] For parenteral application, which includes intramuscular, intradermal, subcutaneous, intranasal, intracapsular, intraspinal, intrasternal, and intravenous injection, particularly suitable are injectable, sterile solutions, preferably oily or aqueous solutions, as well as suspensions, emulsions, or implants, including suppositories. Formulations for injection may be presented in unit dosage form, e.g., in ampoules or in multi-dose containers, with an added preservative. The compositions may take such forms as suspensions, solutions or emulsions in oily or aqueous vehicles, and may contain formulatory agents such as suspending, stabilizing and/or dispersing agents. Alternatively, the active ingredient may be in powder form for constitution with a suitable vehicle, e.g., sterile pyrogen-free water, before use.

[0261] For enteral application, particularly suitable are tablets, dragees, liquids, drops, suppositories, or capsules. The pharmaceutical compositions may be prepared by conventional means with pharmaceutically acceptable excipients such as binding agents (e.g., pregelatinised maize starch, polyvinylpyrrolidone or hydroxypropyl methylcellulose); fillers (e.g., lactose, microcrystalline cellulose or calcium hydrogen phosphate); lubricants (e.g., magnesium stearate, talc or silica); disintegrants (e.g., potato starch or sodium starch glycolate); or wetting agents (e.g., sodium lauryl sulphate). The tablets may be coated by methods well known in the art. Liquid preparations for oral administration may take the form of, for example, solutions, syrups or suspensions, or they may be presented as a dry product for constitution with water or other suitable vehicle before use. Such liquid preparations may be prepared by conventional means with pharmaceutically acceptable additives such as suspending agents (e.g., sorbitol syrup, cellulose derivatives or hydrogenated edible fats); emulsifying agents (e.g., lecithin or acacia); non-aqueous vehicles (e.g., almond oil, oily esters, ethyl alcohol or fractionated vegetable oils); and preservatives (e.g., methyl or propyl-p-hydroxybenzoates or sorbic acid). The preparations may also contain buffer salts, flavoring, coloring and sweetening agents as appropriate. A syrup, elixir, or the like can be used wherein a sweetened vehicle is employed.

[0262] Sustained or directed release compositions can be formulated, e.g., liposomes or those wherein the active compound is protected with differentially degradable coatings, e.g., by microencapsulation, multiple coatings, etc. It is also possible to freeze dry the new compounds and use the lyophilizates obtained, for example, for the preparation of products for injection.

[0263] For administration by inhalation, the compounds for use according to the present invention are conveniently delivered in the form of an aerosol spray presentation from pressurized packs or a nebulizer, with the use of a suitable propellant, e.g., dichlorodifluoromethane, trichlorofluoromethane, dichlorotetrafluoroethane, carbon dioxide or other suitable gas. In the case of a pressurized aerosol the dosage unit may be determined by providing a valve to deliver a metered amount. Capsules and cartridges of e.g., gelatin for use in an inhaler or insufflator may be formulated containing a powder mix of the compound and a suitable powder base such as lactose or starch.

[0264] For topical application, there are employed as non-sprayable forms, viscous to semi-solid or solid forms comprising a carrier compatible with topical application and having a dynamic viscosity preferably greater than water. Suitable formulations include but are not limited to solutions, suspensions, emulsions, creams, ointments, powders, liniments, salves, aerosols, etc., which are, if desired, sterilized or mixed with auxiliary agents, e.g., preservatives, stabilizers, wetting agents, buffers or salts for influencing osmotic pressure, etc. For topical application, also suitable are sprayable aerosol preparations wherein the active ingredient, preferably in combination with a solid or liquid inert carrier material, is packaged in a squeeze bottle or in admixture with a pressurized volatile, normally gaseous propellant, e.g., a freon.

[0265] The compositions may, if desired, be presented in a pack or dispenser device which may contain one or more unit dosage forms containing the active ingredient. The pack may for example comprise metal or plastic foil, such as a blister pack. The pack or dispenser device may be accompanied by instructions for administration.

### Genetic Immunization

[0266] Genetic immunization according to the present invention elicits an effective immune response without the use of infective agents or infective vectors. Vaccination techniques which usually do produce a CTL response do so through the use of an infective agent. A complete, broad based immune response is not generally exhibited in individuals immunized with killed, inactivated or subunit vaccines. The present invention achieves the full complement of immune responses in a safe manner without the risks and problems associated with vaccinations that use infectious agents.

[0267] According to the present invention, DNA or RNA that encodes a target protein is introduced into the cells of an individual where it is expressed, thus producing the target protein. The DNA or RNA is linked to regulatory elements necessary for expression in the cells of the individual. Regulatory elements for DNA include a promoter and a polyadenylation signal. In addition, other elements, such as a Kozak region, may also be included in the genetic construct.

[0268] The genetic constructs of genetic vaccines comprise a nucleotide sequence that encodes a target protein operably linked to regulatory elements needed for gene expression. Accordingly, incorporation of the DNA or RNA molecule into a living cell results in the expression of the DNA or RNA encoding the target protein and thus, production of the target protein.

[0269] When taken up by a cell, the genetic construct which includes the nucleotide sequence encoding the target protein operably linked to the regulatory elements may remain present in the cell as a functioning extrachromosomal molecule or it may integrate into the cell's chromosomal DNA. DNA may be introduced into cells where it remains as separate genetic material in the form of a plasmid. Alternatively, linear DNA which can integrate into the chromosome may be introduced into the cell. When introducing DNA into the cell, reagents which promote DNA integration into chromosomes may be added. DNA sequences which are useful to promote integration may also be included in the DNA molecule. Since integration into the chromosomal DNA necessarily requires manipulation of the chromosome, it is preferred to maintain the DNA construct as a replicating or non-replicating extrachromosomal molecule. This reduces the risk of damaging the cell by splicing into the chromosome without affecting the effectiveness of the vaccine. Alternatively, RNA may be administered to the cell. It is also contemplated to provide the genetic construct as a linear minichromosome including a centromere, telomeres and an origin of replication.

[0270] The necessary elements of a genetic construct of a genetic vaccine include a nucleotide sequence that encodes a target protein and the regulatory elements necessary for expression of that sequence in the cells of the vaccinated individual. The regulatory elements are operably linked to the DNA sequence that encodes the target protein to enable expression.

[0271] The molecule that encodes a target protein is a protein-encoding molecule which is translated into protein. Such molecules include DNA or RNA which comprise a nucleotide sequence that encodes the target protein. These molecules may be cDNA, genomic DNA, synthesized DNA or a hybrid thereof or an RNA molecule such as mRNA. Accordingly, as used herein, the terms “DNA construct”, “genetic construct” and “nucleotide sequence” are meant to refer to both DNA and RNA molecules.

[0272] The regulatory elements necessary for gene expression of a DNA molecule include: a promoter, an initiation codon, a stop codon, and a polyadenylation signal. In addition, enhancers are often required for gene expression. It is necessary that these elements be operable in the vaccinated individual. Moreover, it is necessary that these elements be operably linked to the nucleotide sequence that encodes the target protein such that the nucleotide sequence can be expressed in the cells of a vaccinated individual and thus the target protein can be produced.

[0273] Initiation codons and stop codons are generally considered to be part of a nucleotide sequence that encodes the target protein. However, it is necessary that these elements are functional in the vaccinated individual.

[0274] Similarly, promoters and polyadenylation signals used must be functional within the cells of the vaccinated individual.

[0275] Examples of promoters useful to practice the present invention, especially in the production of a genetic vaccine for humans, include but are not limited to promoters from Simian Virus 40 (SV40), Mouse Mammary Tumor Virus (MMTV) promoter, Human Immunodeficiency Virus (HIV) such as the HIV Long Terminal Repeat (LTR) promoter, Moloney virus, ALV, Cytomegalovirus (CMV) such as the CMV immediate early promoter, Epstein Barr Virus (EBV), Rous Sarcoma Virus (RSV) as well as promoters from human genes such as human Actin, human Myosin, human Hemoglobin, human muscle creatine and human metalothionein.

[0276] Examples of polyadenylation signals useful to practice the present invention, especially in the production of a genetic vaccine for humans, include but are not limited to SV40 polyadenylation signals and LTR polyadenylation signals. In particular, the SV40 polyadenylation signal which is in pCEP4 plasmid (Invitrogen, San Diego, Calif.), referred to as the SV40 polyadenylation signal, can be used. Additionally, the bovine growth hormone (bgh) polyadenylation signal can serve this purpose.

[0277] In addition to the regulatory elements required for DNA expression, other elements may also be included in the DNA molecule. Such additional elements include enhancers. The enhancer may be selected from the group including but not limited to: human Actin, human Myosin, human Hemoglobin, human muscle creatine and viral enhancers such as those from CMV, RSV and EBV.

[0278] Genetic constructs can be provided with a mammalian origin of replication in order to maintain the construct extrachromosomally and produce multiple copies of the construct in the cell. Plasmids pCEP4 and pREP4 from Invitrogen (San Diego, Calif.) contain the Epstein Barr virus origin of replication and nuclear antigen EBNA-1 coding region which produces high copy episomal replication without integration.

[0279] An additional element may be added which serves as a target for cell destruction if it is desirable to eliminate cells receiving the genetic construct for any reason. A herpes thymidine kinase (tk) gene in an expressible form can be included in the genetic construct. When the construct is introduced into the cell, tk will be produced. The drug gangcyclovir can be administered to the individual and that drug will cause the selective killing of any cell producing tk. Thus, a system can be provided which allows for the selective destruction of vaccinated cells.

[0280] In order to be a functional genetic construct, the regulatory elements must be operably linked to the nucleotide sequence that encodes the target protein. Accordingly, it is necessary for the initiation and termination codons to be in frame with the coding sequence.

[0281] Open reading frames (ORFs) encoding the protein of interest and another or other proteins of interest may be introduced into the cell on the same vector or on different vectors. ORFs on a vector may be controlled by separate promoters or by a single promoter. In the latter arrangement, which gives rise to a polycistronic message, the ORFs will be separated by translational stop and start signals. The presence of an internal ribosome entry site (IRES) site between these ORFs permits the production of the expression product originating from the second ORF of interest, or third, etc. by internal initiation of the translation of the bicistronic or polycistronic mRNA.

[0282] According to the invention, the genetic vaccine may be administered directly into the individual to be immunized or ex vivo into removed cells of the individual which are reimplanted after administration. By either route, the genetic material is introduced into cells which are present in the body of the individual. Routes of administration include, but are not limited to, intramuscular, intraperitoneal, intradermal, subcutaneous, intravenous, intraarterially, intraoccularly and oral as well as transdermally or by inhalation or suppository. Preferred routes of administration include intramuscular, intraperitoneal, intradermal and subcutaneous injection. Genetic constructs may be administered by means including, but not limited to, traditional syringes, needleless injection devices, or microprojectile bombardment gene guns. Alternatively, the genetic vaccine may be introduced by various means into cells that are removed from the individual. Such means include, for example, ex vivo transfection, electroporation, microinjection and microprojectile bombardment. After the genetic construct is taken up by the cells, they are reimplanted into the individual. It is contemplated that otherwise non-immunogenic cells that have genetic constructs incorporated therein can be implanted into the individual even if the vaccinated cells were originally taken from another individual.

[0283] The genetic vaccines according to the present invention comprise about 1 nanogram to about 1000 micrograms of DNA. In some preferred embodiments, the vaccines contain about 10 nanograms to about 800 micrograms of DNA. In some preferred embodiments, the vaccines contain about 0.1 to about 500 micrograms of DNA. In some preferred embodiments, the vaccines contain about 1 to about 350 micrograms of DNA. In some preferred embodiments, the vaccines contain about 25 to about 250 micrograms of DNA. In some preferred embodiments, the vaccines contain about 100 micrograms DNA.

[0284] The genetic vaccines according to the present invention are formulated according to the mode of administration to be used. One having ordinary skill in the art can readily formulate a genetic vaccine that comprises a genetic construct. In cases where intramuscular injection is the chosen mode of administration, an isotonic formulation is preferably used. Generally, additives for isotonicity can include sodium chloride, dextrose, mannitol, sorbitol and lactose. In some cases, isotonic solutions such as phosphate buffered saline are preferred. Stabilizers include gelatin and albumin. In some embodiments, a vaso-constriction agent is added to the formulation. The pharmaceutical preparations according to the present invention are provided sterile and pyrogen free.

[0285] Genetic constructs may optionally be formulated with one or more response enhancing agents such as: compounds which enhance transfection, i.e., transfecting agents; compounds which stimulate cell division, i.e., replication agents; compounds which stimulate immune cell migration to the site of administration, i.e., inflammatory agents; compounds which enhance an immune response, i.e., adjuvants or compounds having two or more of these activities.

[0286] In one embodiment, bupivacaine, a well known and commercially available pharmaceutical compound, is administered prior to, simultaneously with or subsequent to the genetic construct. Bupivacaine and the genetic construct may be formulated in the same composition. Bupivacaine is particularly useful as a cell stimulating agent in view of its many properties and activities when administered to tissue. Bupivacaine promotes and facilitates the uptake of genetic material by the cell. As such, it is a transfecting agent. Administration of genetic constructs in conjunction with bupivacaine facilitates entry of the genetic constructs into cells. Bupivacaine is believed to disrupt or otherwise render the cell membrane more permeable. Cell division and replication is stimulated by bupivacaine. Accordingly, bupivacaine acts as a replicating agent. Administration of bupivacaine also irritates and damages the tissue. As such, it acts as an inflammatory agent which elicits migration and chemotaxis of immune cells to the site of administration. In addition to the cells normally present at the site of administration, the cells of the immune system which migrate to the site in response to the inflammatory agent can come into contact with the administered genetic material and the bupivacaine. Bupivacaine, acting as a transfection agent, is available to promote uptake of genetic material by such cells of the immune system as well.

[0287] In addition to bupivacaine, mepivacaine, lidocaine, procains, carbocaine, methyl bupivacaine, and other similarly acting compounds may be used as response enhancing agents. Such agents act as cell stimulating agents which promote the uptake of genetic constructs into the cell and stimulate cell replication as well as initiate an inflammatory response at the site of administration.

[0288] Other contemplated response enhancing agents which may function as transfecting agents and/or replicating agents and/or inflammatory agents and which may be administered include lectins, growth factors, cytokines and lymphokines such as alpha-interferon, gamma-interferon, platelet derived growth factor (PDGF), gCSF, gMCSF, TNF, epidermal growth factor (EGF), IL-1, IL-2, IL-4, IL-6, IL-8, IL-10 and IL-12 as well as collagenase, fibroblast growth factor, estrogen, dexamethasone, saponins, surface active agents such as immune-stimulating complexes (ISCOMS), Freund's incomplete adjuvant, LPS analog including monophosphoryl Lipid A (MPL), muramyl peptides, quinone analogs and vesicles such as squalene and squalane, hyaluronic acid and hyaluronidase may also be administered in conjunction with the genetic construct. In some embodiments, combinations of these agents are co-administered in conjunction with the genetic construct. In other embodiments, genes encoding these agents are included in the same or different genetic construct(s) for co-expression of the agents.

[0289] With respect to influenza virus HA, NA, NP and M2 nucleotide sequences of the invention, particularly through genetic immunization, may be used as therapeutics or prophylatics in the treatment of influenza virus infection. A therapeutically effective dose refers to that amount of the compound sufficient to result in amelioration of symptoms or a prolongation of survival in a patient. Toxicity and therapeutic efficacy of such compounds can be determined by standard pharmaceutical procedures in cell cultures or experimental animals, e.g., for determining the LD50 (the dose lethal to 50% of the population) and the ED50 (the dose therapeutically effective in 50% of the population). The dose ratio between toxic and therapeutic effects is the therapeutic index and it can be expressed as the ratio LD50/ED50. Compounds which exhibit large therapeutic indices are preferred. The data obtained from cell culture assays and animal studies can be used in formulating a range of dosage for use in humans. The dosage of such compounds lies preferably within a range of circulating concentrations that includes the ED50 with little or no toxicity. The dosage may vary within this range depending upon the dosage form employed and the route of administration utilized. For any compound used in the method of the invention, the therapeutically effective dose can be estimated initially from cell culture assays. A dose may be formulated in animal models to achieve a circulating plasma concentration range that includes the (e.g., the concentration of the test compound which achieves a half-maximal inhibition of viral infection relative to the amount of the event in the absence of the test compound) as determined in cell culture. Such information can be used to more accurately determine useful doses in humans. Levels in plasma may be measured, for example, by high performance liquid chromatography (HPLC).

[0290] The compounds (for genetic immunization) of the invention may, further, serve the role of a prophylactic vaccine, wherein the host produces antibodies and/or CTL responses against influenza virus HA, NA, NP and M2, which responses then preferably serve to neutralize influenza viruses by, for example, inhibiting further influenza infection. Administration of the compounds of the invention as a prophylactic vaccine, therefore, would comprise administering to a host a concentration of compounds effective in raising an immune response which is sufficient to elicit antibody and/or CTL responses to influenza virus HA, NA, NP and M2 and/or neutralize influenza virus, by, for example, inhibiting the ability of the virus to infect cells. The exact concentration will depend upon the specific compound to be administered, but may be determined by using standard techniques for assaying the development of an immune response which are well known to those of ordinary skill in the art.

### Prime and Boost Immunization Regimes

[0291] The present invention relates to “prime and boost” immunization regimes in which the immune response induced by administration of a priming composition is boosted by administration of a boosting composition. For example, effective boosting can be achieved using replication-defective adenovirus vectors, following priming with any of a variety of different types of priming compositions. The present invention employs replication-deficient adenovirus which have been found to be an effective means for providing a boost to an immune response primed to antigen using any of a variety of different priming compositions.

[0292] Replication-deficient adenovirus derived from human serotype 5 has been developed as a live viral vector by Graham and colleagues (Graham & Prevec 1995 Mol Biotechnol 3:207-20; and Bett et al. 1994 PNAS USA 91:8802-6). Adenoviruses are non-enveloped viruses containing a linear double-stranded DNA genome of around 3600 bp. Recombinant viruses can be constructed by in vitro recombination between an adenovirus genome plasmid and a shuttle vector containing the gene of interest together with a strong eukaryotic promoter, in a permissive cell line which allows viral replication. High viral titers can be obtained from the permissive cell line, but the resulting viruses, although capable of infecting a wide range of cell types, do not replicate in any cells other than the permissive line, and are therefore a safe antigen delivery system. Recombinant adenoviruses have been shown to elicit protective immune responses against a number of antigens including tick-borne encephalitis virus NSI protein (Jacobs et al. 1992 J Virol 66:2086-95) and measles virus nucleoprotein (Fooks et al. 1995 Virology 210:456-65).

[0293] Use of embodiments of the present invention allows for recombinant replication-defective adenovirus expressing an antigen to boost an immune response primed by a DNA vaccine. Replication-defective adenoviruses induce an immune response after intramuscular immunization. In prime/boost vaccination regimes the replication-defective adenovirus is also envisioned as being able to prime a response that can be boosted by a different recombinant virus or recombinantly produced antigen.

[0294] Non-human primates immunized with plasmid DNA and boosted with replication-defective adenovirus are protected against challenge. Both recombinant replication-deficient adenovirus and plasmid DNA are vaccines that are safe for use in humans. Advantageously, a vaccination regime using intramuscular immunization for both prime and boost can be employed, constituting a general immunization regime suitable for inducing an immune response, e.g., in humans.

[0295] The present invention in various aspects and embodiments employs a replication-deficient adenovirus vector encoding an antigen for boosting an immune response to the antigen primed by previous administration of the antigen or nucleic acid encoding the antigen.

[0296] A general aspect of the present invention provides for the use of a replication-deficient adenoviral vector for boosting an immune response to an antigen.

[0297] One aspect of the present invention provides a method of boosting an immune response to an antigen in an individual, the method including provision in the individual of a replication-deficient adenoviral vector including nucleic acid encoding the antigen operably linked to regulatory sequences for production of antigen in the individual by expression from the nucleic acid, whereby an immune response to the antigen previously primed in the individual is boosted.

[0298] An immune response to an antigen may be primed by genetic immunization, by infection with an infectious agent, or by recombinantly produced antigen.

[0299] A further aspect of the invention provides a method of inducing an immune response to an antigen in an individual, the method comprising administering to the individual a priming composition comprising the antigen or nucleic acid encoding the antigen and then administering a boosting composition which comprises a replication-deficient adenoviral vector including nucleic acid encoding the antigen operably linked to regulatory sequences for production of antigen in the individual by expression from the nucleic acid.

[0300] A further aspect provides for use of a replication-deficient adenoviral vector, as disclosed, in the manufacture of a medicament for administration to a mammal to boost an immune response to an antigen. Such a medicament is generally for administration following prior administration of a priming composition comprising the antigen or nucleic acid encoding the antigen.

[0301] The priming composition may comprise any viral vector, including adenoviral, or other than adenoviral, such as a vaccinia virus vector such as a replication-deficient strain such as modified virus Ankara (MVA) (Mayr et al. 1978 Zentralbi Bakteriol 167:375-90; Sutter and Moss 1992 PNAS USA 89:10847-51; Sutter et al. 1994 Vaccine 12:1032-40) or NYVAC (Tartaglia et al. 1992 Virology 118:217-32), an avipox vector such as fowlpox or canarypox, e.g., the strain known as ALVAC (Kanapox, Paoletti et al. 1994 Dev Biol Stand 1994 82:65-9), or a herpes virus vector.

[0302] The priming composition may comprise DNA encoding the antigen, such DNA preferably being in the form of a circular plasmid that is not capable of replicating in mammalian cells. Any selectable marker should not be resistant to an antibiotic used clinically, so for example Kanamycin resistance is preferred to Ampicillin resistance. Antigen expression should be driven by a promoter which is active in mammalian cells, for instance the cytomegalovirus immediate early (CMV IE) promoter.

[0303] In particular embodiments of the various aspects of the present invention, administration of a priming composition is followed by boosting with first and second boosting compositions, the first and second boosting compositions being the same or different from one another, e.g., as exemplified below. Still further boosting compositions may be employed without departing from the present invention. In one embodiment, a triple immunization regime employs DNA, then adenovirus (Ad) as a first boosting composition, and then MVA as a second boosting composition, optionally followed by a further (third) boosting composition or subsequent boosting administration of one or other or both of the same or different vectors. Another option is DNA then MVA then Ad, optionally followed by subsequent boosting administration of one or other or both of the same or different vectors.

[0304] The antigen to be included in respective priming and boosting compositions (however many boosting compositions are employed) need not be identical, but should share epitopes. The antigen may correspond to a complete antigen in a target pathogen or cell, or a fragment thereof. Peptide epitopes or artificial strings of epitopes may be employed, more efficiently cutting out unnecessary protein sequence in the antigen and encoding sequence in the vector or vectors. One or more additional epitopes may be included, for instance epitopes which are recognized by T helper cells, especially epitopes recognized in individuals of different HLA types.

[0305] Within the replication-deficient adenoviral vector, regulatory sequences for expression of the encoded antigen will include a promoter. By “promoter” is meant a sequence of nucleotides from which transcription may be initiated of DNA operably linked downstream (i.e., in the 3′ direction on the sense strand of double-stranded DNA). “Operably linked” means joined as part of the same nucleic acid molecule, suitably positioned and oriented for transcription to be initiated from the promoter. DNA operably linked to a promoter is “under transcriptional initiation regulation” of the promoter. Other regulatory sequences including terminator fragments, polyadenylation sequences, enhancer sequences, marker genes, internal ribosome entry site (IRES) and other sequences may be included as appropriate, in accordance with the knowledge and practice of the ordinary person skilled in the art: see, for example, Molecular Cloning: a Laboratory Manual, 3^{rd} edition, Sambrook et al. 2001 Cold Spring Harbor Laboratory Press. Many known techniques and protocols for manipulation of nucleic acid, for example in preparation of nucleic acid constructs, mutagenesis, sequencing, introduction of DNA into cells and gene expression, and analysis of proteins, are described in detail in Current Protocols in Molecular Biology, Ausubel et al. eds., John Wiley & Sons, 1994.

[0306] Suitable promoters for use in aspects and embodiments of the present invention include the cytomegalovirus immediate early (CMV IE) promoter, with or without intron A, and any other promoter that is active in mammalian cells.

[0307] Either or both of the priming and boosting compositions may include an adjuvant or cytokine, such as alpha-interferon, gamma-interferon, platelet-derived growth factor (PDGF), granulocyte macrophage-colony stimulating factor (gM-CSF) granulocyte-colony stimulating factor (gCSF), tumor necrosis factor (TNF), epidermal growth factor (EGF), IL-1, IL-2, IL-4, IL-6, IL-8, IL-10 and IL-12, or encoding nucleic acid therefor Administration of the boosting composition is generally weeks or months after administration of the priming composition, preferably about 2-3 weeks or 4 weeks, or 8 weeks, or 16 weeks, or 20 weeks, or 24 weeks, or 28 weeks, or 32 weeks.

[0308] Preferably, administration of priming composition, boosting composition, or both priming and boosting compositions, is intramuscular immunization.

[0309] Intramuscular administration of adenovirus vaccines or plasmid DNA may be achieved by using a needle to inject a suspension of the virus or plasmid DNA. An alternative is the use of a needless injection device to administer a virus or plasmid DNA suspension (using, e.g., Biojector™) or a freeze-dried powder containing the vaccine (e.g., in accordance with techniques and products of Powderject), providing for manufacturing individually prepared doses that do not need cold storage. This would be a great advantage for a vaccine that is needed in third world countries or undeveloped regions of the world.

[0310] Adenovirus is a virus with an excellent safety record in human immunizations. The generation of recombinant viruses can be accomplished simply, and they can be manufactured reproducibly in large quantities. Intramuscular administration of recombinant replication-deficient adenovirus is therefore highly suitable for prophylactic or therapeutic vaccination of humans against diseases which can be controlled by an immune response.

[0311] The individual may have a disease or disorder such that delivery of the antigen and generation of an immune response to the antigen is of benefit or has a therapeutically beneficial effect.

[0312] Most likely, administration will have prophylactic aim to generate an immune response against a pathogen or disease before infection or development of symptoms.

[0313] Diseases and disorders that may be treated or prevented in accordance with the present invention include those in which an immune response may play a protective or therapeutic role.

[0314] Components to be administered in accordance with the present invention may be formulated in pharmaceutical compositions. These compositions may comprise a pharmaceutically acceptable excipient, carrier, buffer, stabilizer or other materials well known to those skilled in the art. Such materials should be non-toxic and should not interfere with the efficacy of the active ingredient. The precise nature of the carrier or other material may depend on the route of administration, e.g., intravenous, cutaneous or subcutaneous, intramucosal (e.g., gut), intranasal, intramuscular, or intraperitoneal routes.

[0315] As noted, administration is preferably intradermal, subcutaneous or intramuscular.

[0316] Liquid pharmaceutical compositions generally include a liquid carrier such as water, petroleum, animal or vegetable oils, mineral oil or synthetic oil. Physiological saline solution, dextrose or other saccharide solution or glycols such as ethylene glycol, propylene glycol or polyethylene glycol may be included.

[0317] For intravenous, cutaneous or subcutaneous injection, or injection at an intramuscular site, the active ingredient will be in the form of a parenterally acceptable aqueous solution which is pyrogen-free and has suitable pH, isotonicity and stability. Those of relevant skill in the art are well able to prepare suitable solutions using, for example, isotonic vehicles such as Sodium Chloride Injection, Ringer's Injection, Lactated Ringer's Injection. Preservatives, stabilizers, buffers, antioxidants and/or other additives may be included, as required.

[0318] A slow-release formulation may be employed.

[0319] Following production of replication-deficient adenoviral particles and optional formulation of such particles into compositions, the particles may be administered to an individual, particularly human or other primate.

[0320] Administration may be to another animal, e.g., an avian species or a mammal such as a mouse, rat or hamster, guinea pig, rabbit, sheep, goat, pig, horse, cow, donkey, dog or cat.

[0321] Administration is preferably in a “prophylactically effective amount” or a “therapeutically effective amount” (as the case may be, although prophylaxis may be considered therapy), this being sufficient to show benefit to the individual. The actual amount administered, and rate and time-course of administration, will depend on the nature and severity of what is being treated Prescription of treatment, e.g., decisions on dosage etc., is within the responsibility of general practitioners and other medical doctors, or in a veterinary context a veterinarian, and typically takes account of the disorder to be treated, the condition of the individual patient, the site of delivery, the method of administration and other factors known to practitioners. Examples of the techniques and protocols mentioned above can be found in Remington's Pharmaceutical Sciences”, 18^{th} ed., 1990, Mack Publishing Co., Easton, Pa.

[0322] In one preferred regimen, DNA is administered (preferably intramuscularly) at a dose of 10 micrograms to 50 milligrams/injection, followed by adenovirus (preferably intramuscularly) at a dose of 5×10⁷−1×10¹² particles/injection.

[0323] The composition may, if desired, be presented in a kit, pack or dispenser, which may contain one or more unit dosage forms containing the active ingredient. The kit, for example, may comprise metal or plastic foil, such as a blister pack. The kit, pack, or dispenser may be accompanied by instructions for administration.

[0324] A composition may be administered alone or in combination with other treatments, either simultaneously or sequentially dependent upon the condition to be treated.

[0325] Delivery to a non-human mammal need not be for a therapeutic purpose, but may be for use in an experimental context, for instance in investigation of mechanisms of immune responses to an antigen of interest, e.g., protection against disease.

### Part 3

### Protective Immunity to Lethal Challenge of the 1918 Pandemic Influenza Virus by Vaccination

[0326] The remarkable infectivity and virulence of the 1918 influenza virus resulted in an unprecedented pandemic, raising the question of whether it is possible to develop protective immunity to this virus and whether immune evasion may have contributed to its spread. Here, we report that the highly lethal 1918 virus is susceptible to immune protection by a preventive vaccine, and we define its mechanism of action. Immunization with plasmid expression vectors encoding hemagglutinin (HA) elicited potent CD4 and CD8 cellular responses as well as neutralizing antibodies. Antibody specificity and titer were defined by a microneutralization and a pseudotype assay that could assess antibody specificity without the need for high-level biocontainment. This pseudotype inhibition assay can define evolving serotypes of influenza viruses and facilitate the development of immune sera and neutralizing monoclonal antibodies that may help contain pandemic influenza. Notably, mice vaccinated with 1918 HA plasmid DNAs showed complete protection to lethal challenge. T cell depletion had no effect on immunity, but passive transfer of purified IgG from anti-H1(1918) immunized mice provided protective immunity for naive mice challenged with infectious 1918 virus. Thus, humoral immunity directed at the viral HA can protect against the 1918 pandemic virus.

### Introduction

[0327] In the past century, three influenza outbreaks have caused significant increases in human fatalities throughout the world, the hallmark of pandemics. Among them, the 1918 strain was notable for its exceptional infectivity and disease severity in otherwise healthy individuals, with mortality of 40 million to 50 million people worldwide. Through molecular analysis of preserved specimens, it has been possible to characterize the gene products of this virus in an effort to determine the molecular basis for its immunopathogenesis (Stevens J et al. 2006 J Mol Biol 355:1143-1155; Taubenberger J K et al. 2005 Nature 437:889-893; Glaser L et al. 2005 J Virol 79:11533-11536; Reid A H 2004 J Virol 78:12462-12470; Kobasa D 2004 Nature 431:703-707; Tumpey T M et al. 2004 Proc Natl Acad Sci USA 101:3166-3171; Stevens J et al. 2004 Science 303:1866-1870; Gamblin S J et al. 2004 Science 303:1838-1842; Basler C F et al. 2001 Proc Natl Acad Sci USA 98:2746-2751; Reid A H et al. 2000 Proc Natl Acad Sci USA 97:6785-6790). Recently, this virus was reconstructed fully from lung specimens stored in 1918 (Stevens J et al. 2006 J Mol Biol 355:1143-1155; Taubenberger J K et al. 2005 Nature 437:889-893; Glaser L et al. 2005 J Virol 79:11533-11536; Reid A H 2004 J Virol 78:12462-12470; Kobasa D 2004 Nature 431:703-707; Tumpey T M et al. 2004 Proc Natl Acad Sci USA 101:3166-3171; Stevens J et al. 2004 Science 303:1866-1870; Gamblin S J et al. 2004 Science 303:1838-1842; Basler C F et al. 2001 Proc Natl Acad Sci USA 98:2746-2751; Reid A H et al. 2000 Proc Natl Acad Sci USA 97:6785-6790) and shown to cause highly lethal infection in mice. This model has provided an opportunity to analyze the genetic basis of its virulence and to explore mechanisms of immunity relevant to the development of vaccines and antivirals for this and other influenza viruses with pandemic potential. Specifically, we sought to determine whether it is possible to generate protective immunity to this virus, to define potential mechanisms of immune protection, and to ascertain whether countermeasures can be developed to contain outbreaks.

### Results

### Generation of Expression Vectors

[0328] To evaluate the protective immune response against the 1918 influenza virus, synthetic plasmid expression vectors encoding HA were generated. Plasmids expressing wild-type (WT) hemagglutinin (HA) (GenBank accession no. DQ868374) or HA with a mutation in the HA cleavage site (GenBank no. DQ868375) that attenuates influenza virus during viral replication were prepared by using nonviral codons, both to ensure compatibility with mammalian codon usage and to exclude the unlikely possibility of homologous reassortment with WT influenza viruses that might generate replication-competent H1(1918) virus (FIG. 156A). Expression was confirmed in transfected human renal 293T cells by Western blot analysis using antisera from mice vaccinated with these DNA expression vectors (FIG. 156B).

[0329] Referring to FIG. 155, expression of viral HAs is depicted. In FIG. 156A, the structure of the vectors, together with the indicated specific mutations in the cleavage site, for immunogens and lentiviral vector pseudotypes is shown. In FIG. 156B, expression of the indicated viral HAs was determined by Western blot analysis with antisera reactive to the 1918 influenza HA. Expression was evaluated after transfection of the indicated plasmids in 293T cells. Arrows indicate the relevant viral HA bands.

Vaccination with DNA Vaccines and Analysis of Cellular Immune Responses

[0330] Antisera to the 1918 HA were generated by intramuscular inoculation of BALB/c mice with DNA vaccines. DNA vaccines included the WT 1918 HA as well as an attenuated HA (1918) cleavage site (ACS) mutant (FIG. 156A). Immunization with HA induced significant cellular and humoral responses. For example, H1(1918)ACS induced a >10-fold increase in H1(1918)-specific antibody measured by ELISA (FIG. 157A Left). The neutralization activity was confirmed by the microneutralization assay using live 1918 (H1N1) virus (FIG. 157A Right). Neutralization titers of ≈1:80 were observed with both the WT and mutant HA expression vectors using this assay, with a modest increase in the neutralization titers observed with the attenuated cleavage site mutant. Next, the cellular immune response was characterized in immunized mice. Vaccinated animals showed a marked increase in H1(1918) antigen-specific CD4 and CD8 T cells (FIG. 157B), as determined by intracellular cytokine staining to measure cells synthesizing either IFN-γ and/or TNF-α, at levels at least 62-fold and 122-fold above the background response for each T cell subset, respectively. These responses compared favorably with those observed with other viral spike proteins, including HIV, severe acute respiratory syndrome (SARS), coronavirus, and Ebola virus, all of which contain a number of predicted T cell epitopes.

[0331] Referring to FIG. 157, humoral and cellular immune responses to 1918 influenza HA after DNA vaccination are indicated. In FIG. 157A, antibody responses induced by DNA vaccination against the 1918 influenza HA measured by ELISA (Left) or microneutralization (Right) are shown. The microneutralization assay using dilutions of heat-inactivated sera and titers of virus neutralizing antibody were determined as the reciprocal of the highest dilution of serum that neutralized 100 plaque-forming units of virus in Madin-Darby canine kidney (MDCK) cell cultures on a 96-well plate (Right). ELISA for viral nucleocapsid protein (NP) was performed for determining the presence of the virus as the read-out. Data are presented as the mean for each group. In FIG. 157B, intracellular cytokine staining was performed to analyze the T cell response to viral HA peptides. The percentage of activated T cells that produced either IFN-γ and/or TNF-α in response to stimulation with overlapping peptides in CD4 (Left) or CD8 (Right) is shown. Lymphocytes from mice (n=5 per group) immunized with empty plasmid vector (control) or mice (n=10 per group) immunized with the indicated plasmid at 0, 3, 6, and 12 weeks were assessed, and immune responses were measured 11 days after the final boost. Nonstimulated cells gave responses similar to controls at background levels. Symbols indicate the response of individual animals, and the median value is shown with a horizontal bar.

### Immune Protection Conferred by DNA Vaccination and Mechanism of Action

[0332] To assess the efficacy of this vaccine against lethal infection by the 1918 influenza virus, vaccinated animals were given 100 LD50 of live virus intranasally 14 days after the final DNA plasmid injection. All studies with live reconstructed 1918 virus were performed under high-containment (biosafety level 3 enhanced (BSL3)) laboratory conditions in accordance with guidelines of the National Institutes of Health and the Centers for Disease Control (Tumpey TM et al. 2005 Science 310:77-80 and the world-wide-web at cdc.gov/flu/h2n2bsl3.htm). Both the WT and cleavage mutant H1(1918) plasmids induced complete protection against lethal viral challenge measured by survival (FIG. 158A Upper) as well as extent of weight loss compared with controls (FIG. 158A Lower). To define the mechanism of immune protection, T cell depletion was performed with monoclonal antibodies (anti-mouse CD4(GK1.5), anti-mouse CD8(2.43), or anti-mouse CD90(30-H12)) to CD4, CD8, and CD90 (Thy1.2), previously shown to deplete >99% T cells in lung and spleen (Yang Z-Y et al. 2004 Nature 428:561-564). The same negative control DNA plasmid vectors without an insert were used for both the DNA vaccine and the depletion studies. T cell depletion of H1(1918) immunized animals did not affect survival (FIG. 158B Upper), and these mice showed weight loss comparable with nonimmune Ig-treated animals (FIG. 158B Lower). In contrast, when IgG from immunized mice purified by Protein A chromatography was passively transferred to naive recipients, neutralizing antibodies could be detected in the recipients at levels slightly below those of the immunized mice (FIG. 159A vs. FIG. 157A Left). Importantly, passive transfer of this immune IgG conferred immune protection in 8 of 10 mice, compared with 0 of 10 animals that received IgG from control unvaccinated animals (FIG. 159B; P=0.0007).

[0333] Referring to FIG. 158, immune protection conferred against lethal challenge of 1918 influenza and lack of T cell dependence is shown. In FIG. 158A, immunization with H1(1918), H1(1918)ΔCS, or negative control plasmid expression vectors was performed in mice (n=10 per group) as described (Tumpey T M et al. 2005 Science 310:77-80), and survival (Upper) and weight loss (Lower) were evaluated. The statistical significance between these groups are P=1.08×10⁻⁵ and P=1.08×10⁻⁵ with respect to controls by Fisher's exact test. In FIG. 158B, monoclonal rat anti-mouse anti-CD4, CD8, and CD90 (T cell depletion) were used to deplete T cells in H1(1918)ACS immunized mice, in comparison with a control group of vaccinated animals injected with nonimmune IgG (Control IgG). Vector-immunized animals that received no depletion served as additional controls (Vector). Mice were administered IgG at −3, +3, +9, and +15 days after viral challenge. Mice (n=10 per group) were then evaluated for survival (Upper) and weight loss (Lower). No decrease in immune protection was observed in T cell-depleted animals.

[0334] Referring to FIG. 159, immune mechanism of protection showing dependence on Ig is shown. In FIG. 159A, the activity of control, nonimmune, IgG (control), or anti-HA immune IgG (anti-H1(1918)), purified as described (Yang Z-Y et al. 2004 Nature 428:561-564), was confirmed by ELISA before passive transfer into naive recipients (n=10 per group). Passive transfer is depicted in FIG. 159B. To assess the protective effects of immune IgG, mice received immune or control IgG 24 h before infection with 100 LD50 of 1918 virus. Mice were then monitored for survival and weight loss throughout a 21-day observation period. The difference between the immune (α-H1(1918) IgG) and control IgG (IgG) groups was significant (P=0.0007).

### Development of Pseudotyped Lentiviral Reporters

[0335] The functional activity of this HA was assessed through the use of a pseudotyped lentiviral vector in which the 1918 HA was used instead of the retroviral envelope. The HA pseudoviruses were then characterized for their susceptibility to neutralizing antibodies by using a luciferase reporter gene. Whereas H5-pseudotyped. lentiviral vectors readily mediated entry, the H1(1918) strain was inactive (FIG. 160A Left vs. Center, second column). Because H5 viruses contain a cleavage site recognized more broadly by proteases, the protease cleavage site region from H5 was substituted into the relevant sequence of H1(1918) in an effort to increase its processing to a fusion-competent form. A modification that extended 11 aa (FIG. 156A; H5ΔPS2) from the cleavage site improved entry more than a slightly shorter 9-aa (FIG. 156A; H5ΔPS) addition (FIG. 160A Center, third and fourth column). Insertion of an H5 cleavage site conferred a similar increase in entry for an independent H1 strain, PR/8 (FIG. 160A Right), suggesting that such modifications could allow otherwise incompetent HAs to generate functionally active pseudotyped vectors that could be used to assess neutralizing antibody activity.

[0336] Humoral immunity in mice immunized with 1918 HA plasmid DNAs was assessed by using the viral pseudotype assay. To analyze the ability of antibodies to neutralize virus, the pseudoviruses were incubated with antisera from control and HA-immune animals, and the reduction in luciferase activity was measured. Sera from animals immunized with the H1(1918) or H5(Kan-1) HA expression vectors neutralized pseudotyped lentiviral vectors encoding the homologous, but not the heterologous, HAs at dilutions of 1:400 in this assay, in contrast to nonimmune sera, which had no effect (FIG. 160B). These titers were considerably higher than those measured by microneutralization (FIG. 157A) or hemagglutination inhibition, suggesting that the pseudotype vector inhibition assay is more sensitive. Thus, immunity in the lethal challenge model was readily measured and correlated with protection in this assay.

[0337] Referring to FIG. 160, HA-pseudotyped lentiviral vectors were developed. In FIG. 160A, gene transfer mediated by lentiviral vectors pseudotyped with H1(1918), H5(Kan-1), or other HAs containing the H5 protease cleavage site was measured with a luciferase reporter assay. In FIG. 160B, neutralization by antisera from mice immunized with the indicated HA plasmid expression vectors or no insert (control) plasmid DNA vectors was measured with the luciferase assay with the HA-pseudotyped lentiviral vectors. Reduction of gene transfer in the presence of immune sera was observed in a dose-dependent fashion.

### Discussion

[0338] In this study, gene-based vaccination was used to elicit cellular and humoral immune responses to the 1918 influenza virus HA. The humoral immune response was able to neutralize this virus, and these antibodies were necessary and sufficient to confer protective immunity to lethal challenge by virus. In contrast, although a robust T cell response was observed, this response was not required for protective immunity. Whereas slightly increased weight loss was observed in T cell-depleted animals relative to controls, this difference was also observed to some extent in control animals, likely reflecting stress associated with the additional manipulations. Thus, although it remains possible that T cells may contribute to an antiviral effect and could potentially contribute to cross-heterotypic protection to variant viruses, they are not required for immune protection for this vaccine in the mouse. In humans, immune control is likely also antibody dependent, but we cannot exclude the possibility that cellular mechanisms of protection may contribute to viral clearance. The unique circumstances that contributed to the 1918 pandemic spread are also unknown. Although there has been speculation about the types of viruses that may have circulated before the epidemic and their implications for herd immunity, neither the virus isolates nor sera from these times are available, and the present epidemiologic data do not permit further analysis, although recovery of such viruses through methods used for the 1918 rescue could be informative in the future.

[0339] The ability to use a pseudotyped lentiviral vector with viral HA allows for analysis of neutralizing antibody response with increased sensitivity in the detection of neutralizing antibodies compared with the traditional antiviral assay. In addition, the ability to perform screening in the absence of replication-competent virus allows for methods to screen for neutralizing antibodies and to generate antiviral reagents, for the 1918 pandemic influenza virus, as well as avian H5N1 influenza virus and other possibly highly pathogenic influenza viruses in a conventional biosafety level 2 laboratory. It will also be desirable in the future to compare results from this assay with hemagglutination inhibition to explore its ability to predict protective immunity in humans.

[0340] Further testing is envisioned as confirming that DNA vaccination can confer similar humoral immune responses in humans. Previous experience has shown that this mode of vaccination is somewhat less robust in humans than in rodents. The results nonetheless demonstrate that humoral immune responses are protective against viral infection and provide proof of concept that immunization with H1(1918), whether by gene-based vaccines, recombinant proteins, or inactivated virus, is likely to be successful for the generation of protective immunity in humans. These data also suggest that there is no intrinsic immune resistance of this pandemic influenza virus. This knowledge, together with the enhanced ability to measure and screen for neutralizing antibody as a correlate of protection, will facilitate the development of novel protective vaccines and monoclonal antibodies for the 1918 influenza virus and for contemporary pandemic flu threats.

### Materials and Methods

### Immunogen and Plasmid Construction

[0341] Plasmids encoding different versions of HA protein [A/South Carolina/1/18, GenBank AF117241; A/Thailand/1(KAN-1)/2004, GenBank AAS65615; A/PR/8/34, GenBank P03452] were synthesized by using human-preferred codons as described (Yang Z-Y et al. 2004 Nature 428:561-564) by GeneArt (Regensburg, Germany). All of the H1 and H5 HA cleavage-site mutants were made with the original viral cleavage amino acid sequences changed to PQRETRG (SEQ ID NO: 156), ΔCS, which is originally from a low-pathogen city H5 isolate (A/chicken/Mexico/31381/94; GenBank AAL34297), and the modification resulted in the trypsin-dependent phenotype (Li S et al. 1999 J Infect Dis 179:1132-1138) and may alter the antigenic character. To make the pseudotyped lentiviral vector for H1(1918), the original viral cleavage site was changed to IPQRERRRKKRG (SEQ ID NO: 157), ΔPS, and SPQRERRRKKRG (SEQ ID NO: 158), ΔPS2, which is originally from a highly virulent H5 (A/Thailand/1(KAN-1)/2004), and the modification should result in the trypsin-independent phenotype. Protein expression was confirmed by Western blot analysis (Kong WP et al. 2003 J Virol 77:12764-12772) with serum from mice immunized with HA-expressing plasmid DNA.

[0342] To synthesize the coating antigen for the ELISA, codon-optimized cDNA corresponding to aa 1 to 530 was cloned into CMV/R 8κB expression vector for efficient expression in mammalian cells. This vector utilizes the CMVIR plasmid backbone (Barouch D H et al. 2005 J Virol 79:8828-8834) with several modifications at the NF-κB binding sites in the enhancer/promoter region to enhance immunogenicity of the inserts expressed in the plasmid DNA constructs. Four κB binding sites in the enhancer/promoter region were modified by two pairs to a consensus κB sequence (Leung T H et al. 2004 Cell 118:453464) as follows: nucleotide (nt) 802 GCACCAAAATCAACGGGACTTT (SEQ ID NO: 159) was changed to ACTCACCAAAATCAACGGGAATTC (SEQ ID NO: 160); nt 753 GGGGATTT (SEQ ID NO: 167) was changed to GGGACTT (SEQ ID NO: 168); nt 648 GGGACTTT (SEQ ID NO: 169) was changed to GGGAATTT (SEQ ID NO: 170); and nt 607 TAAATGGCCCGCCTG (SEQ ID NO: 171) was changed to GAACTTCCATAAGCTT (SEQ ID NO: 172). Two additional such sites were introduced upstream of the original enhancer/promoter region as follows: nt 550 GGCAGTACATCA (SEQ ID NO: 173) was changed to GGGAATTTCCA (SEQ ID NO: 174); nt 497 GGGACTTTC (SEQ ID NO: 175) was changed to GGGAACTTC (SEQ ID NO: 176); nt 714 TAAATGGCGGG (SEQ ID NO: 177) was changed to GAATTTCCAAA (SEQ ID NO: 178); and nt 361 GGGGTCATTAGTT (SEQ ID NO: 179) was changed to GGGAACTTC (SEQ ID NO: 180). When tested in mice, a CMV/R 8κB plasmid induced a higher immunological response to HIV clade B envelope immunogen, with higher antigen-specific CD4 and CD8 T cell responses than CMV/R, and also improved antibody responses. A trimerization sequence from bacteriophage T4 fibritin was introduced followed by a thrombin cleavage site and a His tag at the C terminus. The plasmid was then transfected into 293T cells, and the cell media containing the secreted protein was collected and purified by nickel column chromatography. The purified protein contains the following additional residues at the C terminus (RSLVPRGSPGSGYIPEAPRDGQAYVRKDGEWVLLSTFLGHHHHHH) (SEQ ID NO: 181), where the thrombin site is in italics, the fibritin trimerization sequence is underlined, and the His tag is in bold. Similar modifications used for HA molecule structural studies have been described (Stevens J et al. 2004 Science 303:1866-1870).

### Vaccination

[0343] Female BALB/c mice (6-8 weeks old; Jackson Laboratories, Bar Harbor, ME) were immunized intramuscularly with 15 μg of plasmid DNA in 100 μl of PBS (pH 7.4) at weeks 0, 3, and 6 for T lymphocyte depletion, IgG passive transfer, and viral challenge. T cell depletion and antibody transfer were performed as described below. An additional immunization at week 12 was performed in groups for the intracellular cytokine staining assay.

### Flow Cytometric Analysis of Intracellular Cytokines

[0344] CD4+ and CD8+ T cell responses were evaluated by using intracellular cytokine staining for IFN-γ and TNF-α as described (Kong WP et al. 2003 J Virol 77:12764-12772) with peptide pools (15 mers overlapping by 11 aa, 2.5 μg/ml each) covering the HA protein. Cells were then fixed, permeabilized, and stained by using rat monoclonal anti-mouse CD3, CD4, CD8, IFN-γ, and TNF-α (BD-PharMingen, San Diego, Calif.). The IFN-γ- and TNF-α-positive cells in the CD4+ and CD8+ cell populations were analyzed with the program FlowJo (Tree Star, Ashland, Oreg.).

### ELISA for Mouse Anti-HA IgG and IgM

[0345] The mouse anti-HA IgG and IgM ELISA titer was measured by using a described method (Yang Z-Y et al. 2004 J Virol 78:4029-4036). Purified HA protein was made by purification of a transmembrane-domain-truncated HA protein with a trimerization domain, thrombin cleavage site, and His tag expressed in the CMV/R 8κB expression vector. H1 or H5 protein was purified from transfected 293T cell culture supernatants as detailed in Immunogen and Plasmid Construction, also analogous to a described method (Stevens J et al. 2004 Science 303:1866-1870), and used to coat the plate.

### Production of HA Pseudotyped Lentiviral Vectors and Measurement of Neutralizing Activity of Immune Serum

[0346] Influenza HA-pseudotyped lentiviral vectors expressing a luciferase reporter gene were produced as described (Yang Z-Y et al. 2004 J Virol 78:4029-4036). Briefly, 293T cells were cotransfected by using the following plasmids: 7 μg of pCMVΔR8.2, 7 μg of pHR′CMV-Luc, and 125 ng CMV/R 8κB H1(1918), H1(1918)(ΔPS), H1(1918)(ΔPS2), or H1(PR/8)(ΔPS), or H5(Kan-1). Cells were transfected overnight, washed, and replenished with fresh medium. Forty-eight hours later, supernatants were harvested, filtered through a 0.45-μm syringe filter, aliquotted, and used immediately or frozen at −80° C. For neutralization assays, antisera were mixed with 100 μl of pseudoviruses at various dilutions and added to 293A cells (Invitrogen, Carlsbad, Calif.) in 48-well dishes (30,000 cells per well). Plates were washed, and fresh medium was added 14-16 h later. Forty-eight hours after infection, cells were lysed in mammalian cell lysis buffer (Promega, Madison, Wis.). A standard quantity of cell lysate was used in a luciferase assay with luciferase assay reagent (Promega) according to the manufacturer's protocol.

### Microneutralization Assay of 1918 (H1N1) by Mouse Immune Antisera

[0347] Two-fold dilutions of heat-inactivated sera were tested in a microneutralization assay for the presence of antibodies that neutralized the infectivity of 100 TCID50 (50% tissue culture infectious dose) of 1918 (HINI) viruses on MDCK cell monolayers by using two wells per dilution on a 96-well plate as described (Rowe T et al. 1999 J Clin Microbiol 37:937-943). After 2 days of incubation, cells were fixed, and ELISA was performed to detect the presence of viral nucleoprotein (NP) and determine the neutralization activity.

Challenge of Mice with Live 1918 (H1N1) Virus

[0348] Two weeks after final vaccination, mice were challenged intranasally with 100 LD50 of 1918 (HINI) virus in a volume of 50 μl. After infection, mice were monitored daily for disease signs and death for 21 days after infection Individual body weights and death were recorded for each group on various days after inoculation. All 1918 influenza virus studies were performed under high-containment biosafety level 3 enhanced (BSL3) as described (Tumpey T M et al. 2005 Science 310:77-80).

### Depletion of T Cell Subsets in Vivo

[0349] To deplete specific T cell subsets, known rat monoclonal antibodies (anti-mouse CD4 (GK1.5), anti-mouse CD8(2.43), or anti-mouse CD90(30-H12)), prepared as described (Yang Z-Y et al. 2004 Nature 428:561-564; Epstein S L et al. 2005 Vaccine 23:5404-5410) and obtained from the National Cell Culture Center (Minneapolis, Minn.), were administered i.p. (1 mg each in 1 ml of PBS) 3 days before challenge and 3, 9, and 15 days after the viral challenge. For nonimmune Ig treatment (control), an isotype-matched anti-human leukocyte antigen (SFR3-D5) mononclonal antibody was used.

### Passive Transfer of Ig

[0350] IgG from mice immunized with plasmid DNA encoding HAACS (immune) or no insert (controls) was purified from sera by using a Montage Antibody Purification Kit (Millipore, Billerica, Mass.), and antibody titer was confirmed by ELISA. Briefly, 0.3 ml of purified IgG (from≈0.7 ml of serum) was administered i.v. into each recipient naïve mouse (n=10 per group) by tail vein injection 24 h before challenge.

### Statistical Analysis

[0351] Each individual animal immune response was counted as an individual value for statistical analysis. The significance of the cellular and humoral immune responses was calculated by Student's t test (tails=2, type=2) as indicated by the P value. For immune protection between groups, Fisher's exact test was used to analyze the data, and the result was indicated by the P value.

### Part 4

[0352] Previous Experience with CMV/R Promoter VRC-1012 Plasmid Backbone DNA Vaccines

[0353] VRC vaccines utilizing a VRC-1012 plasmid backbone with the translational enhancer element of the Human T-cell Leukemia Virus Long Terminal Repeat (the R element) substituted for a portion of the Cytomegalovirus (CMV) 5′ untranslated region have undergone standard preclinical safety testing (biodistribution and repeated-dose toxicity). Two vaccines constructed in this backbone have been evaluated in nonclinical GLP toxicology and biodistribution studies, followed by Phase I clinical studies under BB-IND 11995 (SARS) (n=10 subjects) and BB-IND 11294 (Ebola) (n=21 subjects). In addition, the CMV/R promoter was allowed into initial clinical testing of an HIV vaccine (BB-IND 11750) based on prior human experience with the Ebola vaccine (BB-IND 11294), without new preclinical safety studies required. This HIV vaccine product has advanced to Phase 11 testing (BB-IND 12326) as part of a DNA prime-recombinant adenovector boost regimen. It has been administered to 55 subjects at the VRC Clinic and is currently enrolling in three international studies. The preclinical and clinical experience with VRC vaccines in the CMV/R promoter/VRC-1012 plasmid backbone suggests that modifications to the inserted gene do not significantly impact vaccine biodistribution. Furthermore human clinical safety data with this promoter have now been obtained in over 100 human subjects under several INDs, as summarized below.

Descriptions of Modified Influenza Plasinid DNA Vaccines The new influenza vaccine products utilize the 1012 plasmid backbone constructed with a CMV /R 8κB promoter that has not yet been tested in humans, but is very similar to the CMV/R promoter that has been tested in over 100 human subjects (see below). The sequences of both the CMV/R and CMV/R 8κB promoters are compared below.

[0354] The family of transcription factors, NF-κB, plays an essential role in inflammatory and immunological responses. Members of the NF-κB family finction by binding to their DNA binding site in the promoter/enhancer region of the genes that they regulate. Several NF-κB binding sites in the CMV/R 8κB promoter have been modified to incorporate optimal κB sites in an effort to enhance immunogenicity of the constructs There are four NF-κB binding sites in the CMV promoter/enhancer. In an effort to further improve the CMV/R DNA expression system, it was rationalized that optimization of these binding sites to a consensus sequence by minor nucleotide changes might enhance their ability to induce immunological responses.

[0355] The CMV/R 8κB plasmid was evaluated in mice for its ability to induce immunological responses to the HIV envelope gp 145 (ΔCFI)(ΔV12)(Bal) immunogen. Five mice were vaccinated with 2.5 μg plasmid DNA at Weeks 0, 3, and 6. Ten days after the last vaccination, serum and spleens were collected for antigen specific ELISA and T-cell response analyses. The results (see below) showed that the new CMV/R 8κB vector could generate statistically higher antigen specific CD4 and CD8 T-cell responses than CMV/R, and also improved antibody responses. Similar changes in the mouse model have shown improved immunogenicity when tested in non-human primates (Barouch, D. H. et al. 2005 J Virol 79:8828-8834).

### VRC Influenza Plasniid DNA Vaccines

[0356] Three new vaccines have been developed, each composed of a single plasmid DNA encoding hemaggluinin (HA) protein from H1N1, H3N2 and H5N1 subtypes isolated from recent human outbreaks of influenza. The HI protein (A/New Caledonia/20/99/H1N1) expressed by the VRC vaccine has been administered to humans as a component Of the currently licensed Influenza Virus Vaccine Fluzone®. The H3 protein (A/Wyoming/3/03/H3N2) was recommended for use by the CDC for the 2004-2005 flu season (CDC 2005 MMWR Morb Mortal Wkly Rep 54(RR-8): 1-40). The H5 ((A/Thailand/1 (KAN-1)/2004 (H5N1) has been administered to humans in clinical trials of inactivated H5N1 influenza vaccine (NIAID press release). The sources of the HA gene sequences used in the production of the plasmid DNA vaccines are summarized in Table 4 below.

[0357] Plasmid VRC-7727 encodes Influenza HA H1, VRC-7729 encodes HA H3, and VRC-7721 encodes HA H5. For each construct, the plasmid encodes a modified HA protein with a mutation at the protease cleavage site. The original viral cleavage sequence was changed from wild-type of the original strain to PQRETRG (SEQ ID NO: 182) which is originally from a non-pathogenic H5 isolate (A/chicken/Mexico/31381/94) and other non-pathogenic strains with the same amino acid sequence. This mutated sequence makes the HA protein less accessible to cleavage by cellular proteases (e.g., trypsin, furin) which is one of the most critical steps for viral infection.

[0358] The nucleic acid sequences for six insert sequences, including VRC7720, VRC7721, VRC7722, VRC 7723 (VRC 7727), VRC 7724, and VRC 7725 (VRC 7729) are given in FIGS. 161-166.

TABLE 4
Description of VRC Influenza Plasmid DNA Vaccines

| | Plasmid | | | |
|---|---|---|---|---|
| | Number | Vaccine Product | Source of HA Gene Insert | Description of HA Gene Insert |
| Influenza A | VRC-7727 | VRC-FLUDNA031-00-VP | Influenza A New Caledonia 20/99 | Genebank #AY289929 |
| vaccines | | | (H1N1), mutant | Expresses HA w/protease |
| | | | | cleavage site modification |
| | VRC-7729 | VRC-FLUDNA033-00-VP | Influenza A Wyoming 3/03 | Genebank #AY531033 |
| | | | (H3N2), mutant | Expresses HA w/protease |
| | | | | cleavage site modification |
| Avian | VRC-7721 | VRC-AVIDNA035-00-VP | Influenza A A/Thailand/1 (Kan-1) | Genebank #AY555150 |
| Influenza | | | 2004 (H5N1), mutant | Expresses HA w/protease |
| vaccines | | | | cleavage site modification |

### Sequences of CMV/R and CMV/R 8κB Promoters and Plasniids

[0359] The CMV/R and CMV/R 8κB plasmids are 99.1% identical throughout their entire length (minus the inserted HA gene). The only areas of divergence are within the sequences of the CMV/R and CMV/R 8κB promoters shown in FIG. 167.

[0360] Apart from the modified protease cleavage sites, the amino acid sequences in all the influenza plasmids are the same as the wild-type HA proteins, but the gene sequences have been modified for optimal expression in human cells. These plasmids have been constructed in the 1012 plasmid backbone with the CMV/R 8κB promoter.

[0361] Referring to FIG. 168, the amino acid sequences of the VRC 7721 and VRC 7720 inserts are aligned, highlighting the modified protease cleavave site in VRC 7721.

### Immunogenicity Studies of CMV/R and CMV/R 8κB Plasmid DNA Vectors in Mice

[0362] Non-clinical, non-GLP immunogenicity studies were conducted by investigators at the Vaccine Research Center, National Institutes of Allergy and Infectious Diseases, National Institutes of Health, Bethesda, MD with CMV/R and CMV/R 8κB plasmid DNA vectors expressing lade B envelope in mice. HIV clade B (Ba1 strain) envelope gp145 ΔCF1ΔV12 is the same modified Env gene expressed by the CMV/R plasmid contained in the VRC HIV vaccine product VRC-HIVDNAO16-00-VP (BB-IND 11750). Several assays were used to evaluate immune responses elicited by the vaccine. Cellular immune responses, interferon gamma (IFN-γ) and tumor necrosis factor alpha (TNF-α) production by antigen stimulated cells, was measured by the flow cytometry-based intracellular cytokine staining (ICS) assay. In this system, the stimulated cells are characterized by phenotypic lymphocyte markers, allowing for precise quantification of the type of cells (for example CD4+ or CD8+ T-lymphocytes) responding to vaccine antigens. Humoral immune responses were measured using an Enzyme-Linked Immunosorbant Assay (ELISA) or a modified assay where the purified HIV envelope protein, (prepared from cells transfected with the same plasmid DNA vector), was bound to the test plate system.

Intracellular Flow Cytometric Analysis of HIV-1 Protein-specific CD4+ and CD8+ Responses after Vaccination

[0363] Harvested spleen cells (106 cells/peptide pool) were stimulated for 6 hours. The last five hours of stimulation occurred in the presence of 10 μg/mL brefeldin A (Sigina), with peptide pools having the same amino acid sequences as those expressed by the vaccine vectors. All peptides used in this report were 15-mers overlapping by 11 amino acids that spanned the complete sequence of the genes tested. Cells were permeabilized, fixed and stained with monoclonal antibodies (rat anti-mouse cell surfaces antigens CD3, CD4 and CD8, Pharmingen) followed by multiparametric flow cytometry to detect the IFN-γ and TNF-α positive cells in the CD4+ or CD8+ T-cell population.

[0364] Statistical analyses of the observed CD4+ and CD8+ responses between control plasmid-vaccinated and test article-vaccinated mice were performed by the Mann-Whitney test using GraphPad Prism 3.0 software, San Diego, Calif. Assuming a frequency of >0.1% cytokine producing cells represented a positive result, then CD4+responses were observed in 5/5 of CMV/R wild-type (wt) vaccinated mice and in 5/5 of CMV/R 8κB (8κB) mice. There was a significantly higher CD4+response in 8κB vaccinated mice when compared to those vaccinated with wild-type vectors (p=0.021). CD8+ responses were observed in 2/5 of wt-vaccinated mice and in 4/5 8κB vaccinated mice as described in FIG. 169.

[0365] Referring to FIG. 169, intracellular flow cytometric analysis of gp145 env-specific CD4+and CD8+T-cell responses of immunized mice was performed. Groups of mice (5/group were vaccinated with 2.5 μg DNA plasmid, by needle-and syringe, three times (at three week intervals) and immune responses were tested 10 days after the injection. Spleens were removed aseptically, gently homogenized to a single-cell suspension, washed and re-suspended to a final concentration of 10⁶ cells/mL. Each symbol represents the percent positive cells in the CD4+ (left panel) or CD8+ (right panel) T-cell population for one animal. The mean response for the responding animals is indicated by horizontal bars. P values represent comparison of groups by Mann-Wbitney nonparametric analysis.

### ELISA Assays

[0366] Ninety-six well ELISA plates were coated with 2 μg/ml of affinity-column purified gp140 (dCFI(dV12)(Ba1) overnight at 4° C., blocked with PBS containing 5% skim milk and 2% BSA. The plates were washed with PBS+0.5% Tween-20, and incubated with 100 μL of serum from the vaccinated mice diluted in PBS+2% BSA, added in two-fold serial dilutions to each well, beginning at a dilution of 1:2400, followed by horseradish peroxidase-conjugated goat antimouse immunoglobulin 6 (IgG) and substrate (Fast o-Phenylenediamine dihydrochloride, Sigma). The reaction was stopped by the addition of 50 μL of 1N H₂SO₄, and the optical density was read at 450 nm.

[0367] The mean antibody responses were much higher (average ELISA titer˜1:23,040) in 8κB vaccinated mice compared to wild-type CMV/R (˜1:1,680); p=0.011 as shown in FIG. 170.

[0368] Referring to FIG. 170, end-point dilutions were determined for antibody responses in mice vaccinated with wild-type CMV/R or CMV/R 8κB plasmid DNA expressing HIV gp145. Antibody responsesto HIV gp145 protein in immunized mice, measured by ELISA, is represented on the Y-axis. The thick bar on the X-axis represents the mean of ten test animals vaccinated with CMV/R or CMV/R 8κB. Error bars represent the standard deviation of the mean at each dilution.

### Potency of Influenza Plasmid DNA Vectors in Mice

[0369] Non-clinical, non-GLP immunogenicity studies in mice were conducted at the NIH Vaccine Research Center, in collaboration with the Center for Disease Control and Prevention. Mice were immunized with a CMV/R 8κB plasmid DNA vector expressing avian influenza hemagglutinin (HA) protein (influenza A/Thailand/1(KAN-1)J2004 (H5N1), followed by a lethal challenge with avian flu (influenza A/Vietnam/1203 (H5N1). After challenge, mice were monitored daily for disease signs for 21 days postinfection (p.i.). Individual body weights were recorded for each group on various days p.i.

[0370] The study demonstrated that protective immunity to lethal H5N1 challenge was conferred by vaccination with a CMV/R 8Kκ plasmid DNA vector expressing H5 hemaglutininin. All vaccinated animals survived challenge whereas all the control animals died as shown in FIG. 171. In addition, H5 plasmid DNA vaccinated animals experienced less weight loss than animals vaccinated with an empty vector control.

[0371] Referring to FIG. 171, protective immunity to lethal H5N1 Influenza challenge in mice vaccinated with a CMV/R 8κB plasmid DNA vector expressing H5 Hemagglutinin is shown. Two groups of Balb/C mice (10 mice/H5 group and 5 mice/control group) were injected bilaterally into the hind leg muscle with 5 μg DNA (100 mL) at 3 timepoints, each 21 days apart. Mice were injected either with a CMV/R 8κB plasmid DNA vector expressing H5 hemagglutinin (H5) or an empty CMV/R 8κB plasmid DNA control. Two weeks after the third and final vaccination, mice were challenged intranasally with 100 LD₅₀ of A/Vietnam/1203 (H5N1) in a volume of 50 μL.

Summary of Preclinical and Clinical Experience with Plasmid DNA Backbone Elements Used in VRC Phase I Clinical Trials

[0372] Plasmids containing the VRC-1012 backbone (Hartikka, J. et al. 1996 Hum Gen Ther 7:1205-1217) and the CMV/R promoter elements (Barouch, D. H. et al. 2005 J Virol 79:8828-8834) have undergone standard preclinical safety testing and have been evaluated in multiple human clinical trials as elements of DNA vaccines (VRC-1012, CMV/R) with demonstrated clinical safety. Preclinical and clinical testing of plasmids containing these elements is summarized in Table 5 below.

TABLE 5
Preclinical and Clinical Experience with Plasmid DNA Vaccines

| | | | Vaccine | | | | Clinical Testing | |
|---|---|---|---|---|---|---|---|---|
| | BB- | | (Number of | Preclinical Testing | | | Clinical | Number of |
| Plasmid | IND | IND Sponsor | Plasmids) | Toxicity | Biodistribution | Integration | Protocol | Subjects |
| CMV | 9782 | DAIDS/NIAID | HIV (1) | + | + | + | VRC 001 | 21 * |
| Promoter & | 10681 | DAIDS/NIAID | HIV (4) | + | + | | VRC 004 | 50 * |
| VRC-1012 | | | | | | | HVTN 052 | 180 * |
| Backbone | | | | | | | RV 156 | 15 * |
| | 11289 | DAIDS/NIAID | | | | | ACTG 5187 | 20 * |
| | 10914 | DAIDS/NIAID | HIV (4) & | ** | ** | | HVTN 044 | 70 * |
| | | | IL2/Ig | | | | | |
| | 11215 | Vical, Inc. | Anthrax (2) | + | + | + | AB01 101 | 40 |
| | 12242 | RCHSPB/NIAID | WNV (1) | + | + | | VRC 302 | 15 |
| CMV/R | 11294 | DAIDS/NIAID | Ebola (3) | + | + | | VRC 204 | 27 * |
| promoter & | 11750 | DAIDS/NIAID | HIV (6) | *** | *** | | VRC 007 | 15 |
| VRC-1012 | 11995 | RCHSPB/NIAID | SARS (1) | + | + | | VRC 301 | 10 |
| Backbone | 12326 | DAIDS/NIAID | HIV (6) | *** | *** | | VRC 008 | 40 |
| | | | | | | | HVTN 204 | 480 * |
| | | | | | | | IAVI V001 | 64 * |
| | | | | | | | RV 172 | 324 * |

* Includes control subjects
** Toxicity and biodistribution studies for the HIV (4) portion of the vaccine (Clade B gag pol nef; Clade A, B, C, env) were waived by CBER due to high degree of antigen homology with HIV (2) vaccine (Clade B gag pol nef, Clade B env) plasmids
*** Toxicity and biodistribution studies for the HIV (6) vaccine with the CMV/R promoter were waived by CBER due to high degree of antigen homology with HIV (4) vaccine plasmids.
+ Indicates that the study was completed;
Note:
Ongoing additional studies testing DNA vaccines in combination with adenovector boosts in additional INDs are not listed.

### Part 5

### Production of HA Pseudotyped Lentiviral Vectors and Measurement of Neutralizing Activity of Immune Serum

[0373] Lentiviral vectors were generated by transfiection of three plasmids into 293T cells. A lentiviral vector plasmid expressing luciferase from an internal cytomegalovirus (CMV) promoter was used as a transfer vector. The packaging plasmid pCMVΔR8.2 (encoding the HIV structural and accessory proteins) was used to express the lentiviral gene products. The influenza HA protein was expressed from a plasmid.

[0374] To measure neutralizing activity of immune serum, three plasmids—a plasmid which encodes luciferase driven ty the CMV promoter; pCMVΔR8.2, which encodes the HIV structural and accessory proteins; and a plasmid encoding the influenza HA protein—were cotransfected into 293T cells and the viral supernatant was harvested 48 h after transfection. The collected supernatants were placed on 293A cells that express the receptor for HA.

[0375] Referring to FIG. 172, influenza HA-pseudotyped lentiviral vectors expressing a luciferase reporter gene were produced as described (Yang Z-Y et al. 2004 J Virol 78:4029-4036, Naldini L et al. 1996 Science 272:263-267; and Lewis, B C et al. 2001 J Virol 75:9339-9344). Briefly, 293T cells were cotransfected by using the following plasmids: 7 μg of pCMVAR8.2, 7 μg of pHR′CMV-Luc, and 125 ng CMV/R 8κB H1(1918), H1(1918)(ΔPS), H1(1918)(ΔPS2), or H1(PR/8)(ΔPS), or H5(Kan-1). pCMVDR8.2 encodes all of the structural and accessory proteins for the lentiviral particles. Cells were transfected overnight, washed, and replenished with fresh medium. Forty-eight hours later, supernatants were harvested, filtered through a 0.45-μm syringe filter, aliquotted, and used immediately or frozen at −80° C. For neutralization assays, antisera were mixed with 100 μl of pseudoviruses at various dilutions and added to 293A cells (Invitrogen, Carlsbad, Calif.) in 48-well dishes (30,000 cells per well). Plates were washed, and fresh medium was added 14-16 h later. Forty-eight hours after infection, cells were lysed in mammalian cell lysis buffer (Promega, Madison, Wis.). A standard quantity of cell lysate was used in a luciferase assay with luciferase assay reagent (Promega) according to the manufacturer's protocol. Example neutralization assay data are given in Table 6.

TABLE 6
Immunization with plasmids

| | Viruses for neutralization Assay | | | | | |
|---|---|---|---|---|---|---|
| | VN/1203/ | Ck/KOR/ES/ | PR/ | VN/1203/ | HK/213/ | HK/491/ |
| | 2004(H5N1) | 2003(H5N1) | 8(H1N1) | 2004(H5N1) | 2003(H5N1) | 97(H5N1) |
| | Threshold dilution | | | | | |
| | 1X = 1:80 | 1X = 1:160 | 1X < 1:40 | 1X < 1:20 | 1X < 1:20 | 1X < 1:20 |
| | dilution | dilution | dilution | dilution | dilution | dilution |
| CMV/R-HA (H1) | 1X | 1X | 64X | 1X | 1X | 1X |
| CMV/R-HA-mutant A (H1) | N/D | N/D | 128X | N/D | N/D | N/D |
| CMV/R-HA-mutant B (H1) | N/D | N/D | 4X | N/D | N/D | N/D |
| CMV/R-HA (H5) | 4X | 1X | 1X | 1X | 1X | 1X |
| CMV/R-HA-mutant A (H5) | 8X | ½X | N/D | 1.4X | 3.2X | 1.4X |
| CMV/R-HA-mutant B (H5) | 2X | ½X | N/D | 1X | 1X | 1X |
| CMV/R-HA (H1) + | ½X | ½X | 64X | 1X | 1X | 1X |
| CMV/R-NA(N1) | | | | | | |
| CMV/R-HA-mutant A(H1) + | N/D | N/D | 64X | N/D | N/D | N/D |
| CMV/R-NA(N1) | | | | | | |
| CMV/R-HA-mutant B(H1) + | N/D | N/D | 32X | N/D | N/D | N/D |
| CMV/R-NA(N1) | | | | | | |
| CMV/R-HA (H5) + | 2X | ½X | 1X | 1X | 1X | 1X |
| CMV/R-NA(N1) | | | | | | |
| CMV/R-HA-mutant A(H5) + | 1X | ½X | N/D | 1X | 1X | 1X |
| CMV/R-NA(N1) | | | | | | |
| CMV/R-HA-mutant B(H5) + | 1X | ½X | N/D | 1X | 1X | 1X |
| CMV/R-NA(N1) | | | | | | |
| CMV/R + CMV/R-NA(N1) | ½X | 1X | 1X | 1X | 1X | 1X |
| CMV/R | X | 1X | N/D | 1X | 1X | 1X |

[0376] While the present invention has been described in some detail for purposes of clarity and understanding, one skilled in the art will appreciate that various changes in form and detail can be made without departing from the true scope of the invention. All figures, tables, and appendices, as well as patents, applications, and publications, referred to above, are hereby incorporated by reference.

The application's sequence listing, which the Patent Office published only in electronic form, follows.

SEQUENCE LISTING (184 sequences)

SEQ ID NO: 1 - DNA, 6122 bp, Artificial Sequence
  Plasmid DNA: VRC 9123
tcgcgcgtttcggtgatgacggtgaaaacctctgacacatgcagctcccggagacggtcacagcttgtctgtaagcggatgccgggagcagacaagcccgtcagggcgcgtcagcgggtgttggcgggtgtcggggctggcttaactatgcggcatcagagcagattgtactgagagtgcaccatatgcggtgtgaaataccgcacagatgcgtaaggagaaaataccgcatcagattggctattggccattgcatacgttgtatccatatcataatatgtacatttatattggctcatgtccaacattaccgccatgttgacattgattattgactagttattaatagtaatcaattacggggtcattagttcatagcccatatatggagttccgcgttacataacttacggtaaatggcccgcctggctgaccgcccaacgacccccgcccattgacgtcaataatgacgtatgttcccatagtaacgccaatagggactttccattgacgtcaatgggtggagtatttacggtaaactgcccacttggcagtacatcaagtgtatcatatgccaagtacgccccctattgacgtcaatgacggtaaatggcccgcctggcattatgcccagtacatgaccttatgggactttcctacttggcagtacatctacgtattagtcatcgctattaccatggtgatgcggttttggcagtacatcaatgggcgtggatagcggtttgactcacggggatttccaagtctccaccccattgacgtcaatgggagtttgttttggcaccaaaatcaacgggactttccaaaatgtcgtaacaactccgccccattgacgcaaatgggcggtaggcgtgtacggtgggaggtctatataagcagagctcgtttagtgaaccgtcagatcgcctggagacgccatccacgctgttttgacctccatagaagacaccgggaccgatccagcctccatcggctcgcatctctccttcacgcgcccgccgccctacctgaggccgccatccacgccggttgagtcgcgttctgccgcctcccgcctgtggtgcctcctgaactgcgtccgccgtctaggtaagtttaaagctcaggtcgagaccgggcctttgtccggcgctcccttggagcctacctagactcagccggctctccacgctttgcctgaccctgcttgctcaactctagttaacggtggagggcagtgtagtctgagcagtactcgttgctgccgcgcgcgccaccagacataatagctgacagactaacagactgttcctttccatgggtcttttctgcagtcaccgtcgtcgacacgtgtgatcagatatcgcggccgctctagagatatcgccaccatggaaaagatcgtgctgctgctggccattgtgagcctggtgaagagcgaccagatctgcattggctaccacgccaacaatagcacagagcaggtggacaccatcatggaaaaaaacgtgaccgtgacccacgctcaggacatcctggaaaagacccacaacggcaagctgtgtgatctggacggcgtgaagcctctgatcctgagagattgtagcgtggctggatggctgctgggcaaccctatgtgcgacgagttcatcaacgtgcccgagtggagctatatcgtggagaaggccaaccccaccaacgatctgtgttaccccggcagcttcaacgattacgaggaactgaagcacctgctgtcccggatcaaccacttcgagaagatccagatcatccccaagtcctcttggagcgatcacgaagcctctagcggagtgtctagcgcctgtccttacctgggcagccccagcttcttcagaaacgtggtgtggctgatcaagaagaacagcacctaccccaccatcaagaagagctacaacaacaccaaccaggaagatctgctggtcctgtggggaatccaccaccctaatgatgccgccgagcagaccagactgtaccagaaccccaccacctatatcagcatcggcaccagcaccctgaatcagagactggtgcccaagatcgccaccagatccaaggtgaacggccagagcggcaggatggaattcttctggaccatcctgaagcccaacgacgccatcaacttcgagagcaacggcaactttatcgcccctgagtacgcctacaagatcgtgaagaagggcgacagcgccatcatgaagagcgagctggaatacggcaactgcaacaccaagtgccagacacctatgggcgccatcaacagcagcatgcccttccacaacatccaccctctgaccatcggcgagtgccctaagtacgtgaagagcaacagactggtgctggccacaggcctgagaaatagcccccagagagagaccagaggactgtttggagccatcgccggctttattgaaggcggctggcagggaatggtggatggctggtacggctaccaccacagcaatgagcagggctctggatatgccgccgacaaagagtctacccagaaggccatcgacggcgtcaccaacaaggtgaacagcatcatcgacaagatgaacacccagttcgaggctgtgggcagagagttcaacaacctggaacggcggatcgagaacctgaacaagaaaatggaagatggcttcctggatgtgtggacctacaatgccgaactgctggtgctgatggaaaacgagcggaccctggacttccacgacagcaacgtgaagaacctgtacgacaaagtgcggctgcagctgagagacaacgccaaagagctgggcaacggctgcttcgagttctaccacaagtgcgacaacgagtgcatggaaagcatccggaacggcacctacaactaccctcagtacagcgaggaagccaggctgaagagggaagagatcagcggcgtgaaactggaatccatcggcacctaccagatcctgagcatctacagcacagtggcctcttctctggccctggccattatgatggccggactgagcctgtggatgtgcagcaatggcagcctgcagtgcaggatctgcatctgatgaacacgtgggatccagatctgctgtgccttctagttgccagccatctgttgtttgcccctcccccgtgccttccttgaccctggaaggtgccactcccactgtcctttcctaataaaatgaggaaattgcatcgcattgtctgagtaggtgtcattctattctggggggtggggtggggcaggacagcaagggggaggattgggaagacaatagcaggcatgctggggatgcggtgggctctatgggtacccaggtgctgaagaattgacccggttcctcctgggccagaaagaagcaggcacatccccttctctgtgacacaccctgtccacgcccctggttcttagttccagccccactcataggacactcatagctcaggagggctccgccttcaatcccacccgctaaagtacttggagcggtctctccctccctcatcagcccaccaaaccaaacctagcctccaagagtgggaagaaattaaagcaagataggctattaagtgcagagggagagaaaatgcctccaacatgtgaggaagtaatgagagaaatcatagaattttaaggccatgatttaaggccatcatggccttaatcttccgcttcctcgctcactgactcgctgcgctcggtcgttcggctgcggcgagcggtatcagctcactcaaaggcggtaatacggttatccacagaatcaggggataacgcaggaaagaacatgtgagcaaaaggccagcaaaaggccaggaaccgtaaaaaggccgcgttgctggcgtttttccataggctccgcccccctgacgagcatcacaaaaatcgacgctcaagtcagaggtggcgaaacccgacaggactataaagataccaggcgtttccccctggaagctccctcgtgcgctctcctgttccgaccctgccgcttaccggatacctgtccgcctttctcccttcgggaagcgtggcgctttctcatagctcacgctgtaggtatctcagttcggtgtaggtcgttcgctccaagctgggctgtgtgcacgaaccccccgttcagcccgaccgctgcgccttatccggtaactatcgtcttgagtccaacccggtaagacacgacttatcgccactggcagcagccactggtaacaggattagcagagcgaggtatgtaggcggtgctacagagttcttgaagtggtggcctaactacggctacactagaagaacagtatttggtatctgcgctctgctgaagccagttaccttcggaaaaagagttggtagctcttgatccggcaaacaaaccaccgctggtagcggtggtttttttgtttgcaagcagcagattacgcgcagaaaaaaaggatctcaagaagatcctttgatcttttctacggggtctgacgctcagtggaacgaaaactcacgttaagggattttggtcatgagattatcaaaaaggatcttcacctagatccttttaaattaaaaatgaagttttaaatcaatctaaagtatatatgagtaaacttggtctgacagttaccaatgcttaatcagtgaggcacctatctcagcgatctgtctatttcgttcatccatagttgcctgactcggggggggggggcgctgaggtctgcctcgtgaagaaggtgttgctgactcataccaggcctgaatcgccccatcatccagccagaaagtgagggagccacggttgatgagagctttgttgtaggtggaccagttggtgattttgaacttttgctttgccacggaacggtctgcgttgtcgggaagatgcgtgatctgatccttcaactcagcaaaagttcgatttattcaacaaagccgccgtcccgtcaagtcagcgtaatgctctgccagtgttacaaccaattaaccaattctgattagaaaaactcatcgagcatcaaatgaaactgcaatttattcatatcaggattatcaataccatatttttgaaaaagccgtttctgtaatgaaggagaaaactcaccgaggcagttccataggatggcaagatcctggtatcggtctgcgattccgactcgtccaacatcaatacaacctattaatttcccctcgtcaaaaataaggttatcaagtgagaaatcaccatgagtgacgactgaatccggtgagaatggcaaaagcttatgcatttctttccagacttgttcaacaggccagccattacgctcgtcatcaaaatcactcgcatcaaccaaaccgttattcattcgtgattgcgcctgagcgagacgaaatacgcgatcgctgttaaaaggacaattacaaacaggaatcgaatgcaaccggcgcaggaacactgccagcgcatcaacaatattttcacctgaatcaggatattcttctaatacctggaatgctgttttcccggggatcgcagtggtgagtaaccatgcatcatcaggagtacggataaaatgcttgatggtcggaagaggcataaattccgtcagccagtttagtctgaccatctcatctgtaacatcattggcaacgctacctttgccatgtttcagaaacaactctggcgcatcgggcttcccatacaatcgatagattgtcgcacctgattgcccgacattatcgcgagcccatttatacccatataaatcagcatccatgttggaatttaatcgcggcctcgagcaagacgtttcccgttgaatatggctcataacaccccttgtattactgtttatgtaagcagacagttttattgttcatgatgatatatttttatcttgtgcaatgtaacatcagagattttgagacacaacgtggctttccccccccccccattattgaagcatttatcagggttattgtctcatgagcggatacatatttgaatgtatttagaaaaataaacaaataggggttccgcgcacatttccccgaaaagtgccacctgacgtctaagaaaccattattatcatgacattaacctataaaaataggcgtatcacgaggccctttcgtc

SEQ ID NO: 2 - DNA, 6120 bp, Artificial Sequence
  Plasmid DNA: VRC 7702
tcgcgcgtttcggtgatgacggtgaaaacctctgacacatgcagctcccggagacggtcacagcttgtctgtaagcggatgccgggagcagacaagcccgtcagggcgcgtcagcgggtgttggcgggtgtcggggctggcttaactatgcggcatcagagcagattgtactgagagtgcaccatatgcggtgtgaaataccgcacagatgcgtaaggagaaaataccgcatcagattggctattggccattgcatacgttgtatccatatcataatatgtacatttatattggctcatgtccaacattaccgccatgttgacattgattattgactagttattaatagtaatcaattacggggtcattagttcatagcccatatatggagttccgcgttacataacttacggtaaatggcccgcctggctgaccgcccaacgacccccgcccattgacgtcaataatgacgtatgttcccatagtaacgccaatagggactttccattgacgtcaatgggtggagtatttacggtaaactgcccacttggcagtacatcaagtgtatcatatgccaagtacgccccctattgacgtcaatgacggtaaatggcccgcctggcattatgcccagtacatgaccttatgggactttcctacttggcagtacatctacgtattagtcatcgctattaccatggtgatgcggttttggcagtacatcaatgggcgtggatagcggtttgactcacggggatttccaagtctccaccccattgacgtcaatgggagtttgttttggcaccaaaatcaacgggactttccaaaatgtcgtaacaactccgccccattgacgcaaatgggcggtaggcgtgtacggtgggaggtctatataagcagagctcgtttagtgaaccgtcagatcgcctggagacgccatccacgctgttttgacctccatagaagacaccgggaccgatccagcctccatcggctcgcatctctccttcacgcgcccgccgccctacctgaggccgccatccacgccggttgagtcgcgttctgccgcctcccgcctgtggtgcctcctgaactgcgtccgccgtctaggtaagtttaaagctcaggtcgagaccgggcctttgtccggcgctcccttggagcctacctagactcagccggctctccacgctttgcctgaccctgcttgctcaactctagttaacggtggagggcagtgtagtctgagcagtactcgttgctgccgcgcgcgccaccagacataatagctgacagactaacagactgttcctttccatgggtcttttctgcagtcaccgtcgtcgacacgatccgatatcgccgccaccatgaaggccaatctgctggtgctgctgtgcgccctggccgccgccgatgccgatacaatctgcatcggataccacgccaataatagcacagatacagtggatacagtgctggagaagaatgtgacagtgacacacagcgtgaatctgctggaggatagccacaatggaaagctgtgcagactgaagggaatcgctcctctgcagctgggaaagtgcaatatcgccggatggctgctgggaaatcctgagtgcgatcctctgctgcctgtgagaagctggagctacatcgtggagacacctaatagcgagaatggaatctgctaccctggagattttatcgattacgaggagctgagagagcagctgagcagcgtgagcagctttgagagatttgagatctttcctaaggagagcagctggcctaatcacaatacaacaaagggagtgacagccgcctgcagccacgccggaaagagcagcttttacagaaatctgctgtggctgacagagaaggagggaagctaccctaagctgaagaatagctacgtgaataagaagggaaaggaggtgctggtgctgtggggaatccaccaccctagcaatagcaaggatcagcagaatatctaccagaatgagaatgcctacgtgagcgtggtgacaagcaattacaatagaagatttacacctgagatcgccgagagacctaaggtgagagatcaggccggaagaatgaattactactggacactgctgaagcctggagatacaatcatctttgaggccaatggaaatctgatcgctcctagatacgcctttgccctgagcagaggatttggaagcggaatcatcacaagcaatgccagcatgcacgagtgcaatacaaagtgccagacacctctgggagccatcaatagcagcctgccttttcagaatatccaccctgtgacaatcggagagtgccctaagtacgtgagaagcgccaagctgagaatggtgacaggactgagaaatatccctagcatccagagcagaggactgtttggagccatcgccggatttatcgagggaggatggacaggaatgatcgatggatggtacggataccaccaccagaatgagcagggaagcggatacgccgccgatcagaagagcacacagaatgccatcaatggaatcacaaataaggtgaatagcgtgatcgagaagatgaatatccagtttacagccgtgggaaaggagtttaataagctggagaagagaatggagaatctgaataagaaggtggatgatggatttctggatatctggacatacaatgccgagctgctggtgctgctggagaatgagagaacactggattttcacgatagcaatgtgaagaatctgtacgagaaggtgaagagccagctgaagaataatgccaaggagatcggaaatggatgctttgagttttaccacaagtgcgataatgagtgcatggagagcgtgagaaatggaacatacgattaccctaagtacagcgaggagagcaagctgaatagagagaaggtggatggagtgaagctggagagcatgggaatctaccagatcctggccatctacagcacagtggccagcagcctggtgctgctggtgagcctgggagccatcagcttttggatgtgcagcaatggaagcctgcagtgcagaatctgcatctgagcggccgctctagaccaggccctggatccagatctgctgtgccttctagttgccagccatctgttgtttgcccctcccccgtgccttccttgaccctggaaggtgccactcccactgtcctttcctaataaaatgaggaaattgcatcgcattgtctgagtaggtgtcattctattctggggggtggggtggggcaggacagcaagggggaggattgggaagacaatagcaggcatgctggggatgcggtgggctctatgggtacccaggtgctgaagaattgacccggttcctcctgggccagaaagaagcaggcacatccccttctctgtgacacaccctgtccacgcccctggttcttagttccagccccactcataggacactcatagctcaggagggctccgccttcaatcccacccgctaaagtacttggagcggtctctccctccctcatcagcccaccaaaccaaacctagcctccaagagtgggaagaaattaaagcaagataggctattaagtgcagagggagagaaaatgcctccaacatgtgaggaagtaatgagagaaatcatagaattttaaggccatgatttaaggccatcatggccttaatcttccgcttcctcgctcactgactcgctgcgctcggtcgttcggctgcggcgagcggtatcagctcactcaaaggcggtaatacggttatccacagaatcaggggataacgcaggaaagaacatgtgagcaaaaggccagcaaaaggccaggaaccgtaaaaaggccgcgttgctggcgtttttccataggctccgcccccctgacgagcatcacaaaaatcgacgctcaagtcagaggtggcgaaacccgacaggactataaagataccaggcgtttccccctggaagctccctcgtgcgctctcctgttccgaccctgccgcttaccggatacctgtccgcctttctcccttcgggaagcgtggcgctttctcatagctcacgctgtaggtatctcagttcggtgtaggtcgttcgctccaagctgggctgtgtgcacgaaccccccgttcagcccgaccgctgcgccttatccggtaactatcgtcttgagtccaacccggtaagacacgacttatcgccactggcagcagccactggtaacaggattagcagagcgaggtatgtaggcggtgctacagagttcttgaagtggtggcctaactacggctacactagaagaacagtatttggtatctgcgctctgctgaagccagttaccttcggaaaaagagttggtagctcttgatccggcaaacaaaccaccgctggtagcggtggtttttttgtttgcaagcagcagattacgcgcagaaaaaaaggatctcaagaagatcctttgatcttttctacggggtctgacgctcagtggaacgaaaactcacgttaagggattttggtcatgagattatcaaaaaggatcttcacctagatccttttaaattaaaaatgaagttttaaatcaatctaaagtatatatgagtaaacttggtctgacagttaccaatgcttaatcagtgaggcacctatctcagcgatctgtctatttcgttcatccatagttgcctgactcggggggggggggcgctgaggtctgcctcgtgaagaaggtgttgctgactcataccaggcctgaatcgccccatcatccagccagaaagtgagggagccacggttgatgagagctttgttgtaggtggaccagttggtgattttgaacttttgctttgccacggaacggtctgcgttgtcgggaagatgcgtgatctgatccttcaactcagcaaaagttcgatttattcaacaaagccgccgtcccgtcaagtcagcgtaatgctctgccagtgttacaaccaattaaccaattctgattagaaaaactcatcgagcatcaaatgaaactgcaatttattcatatcaggattatcaataccatatttttgaaaaagccgtttctgtaatgaaggagaaaactcaccgaggcagttccataggatggcaagatcctggtatcggtctgcgattccgactcgtccaacatcaatacaacctattaatttcccctcgtcaaaaataaggttatcaagtgagaaatcaccatgagtgacgactgaatccggtgagaatggcaaaagcttatgcatttctttccagacttgttcaacaggccagccattacgctcgtcatcaaaatcactcgcatcaaccaaaccgttattcattcgtgattgcgcctgagcgagacgaaatacgcgatcgctgttaaaaggacaattacaaacaggaatcgaatgcaaccggcgcaggaacactgccagcgcatcaacaatattttcacctgaatcaggatattcttctaatacctggaatgctgttttcccggggatcgcagtggtgagtaaccatgcatcatcaggagtacggataaaatgcttgatggtcggaagaggcataaattccgtcagccagtttagtctgaccatctcatctgtaacatcattggcaacgctacctttgccatgtttcagaaacaactctggcgcatcgggcttcccatacaatcgatagattgtcgcacctgattgcccgacattatcgcgagcccatttatacccatataaatcagcatccatgttggaatttaatcgcggcctcgagcaagacgtttcccgttgaatatggctcataacaccccttgtattactgtttatgtaagcagacagttttattgttcatgatgatatatttttatcttgtgcaatgtaacatcagagattttgagacacaacgtggctttccccccccccccattattgaagcatttatcagggttattgtctcatgagcggatacatatttgaatgtatttagaaaaataaacaaataggggttccgcgcacatttccccgaaaagtgccacctgacgtctaagaaaccattattatcatgacattaacctataaaaataggcgtatcacgaggccctttcgtc

SEQ ID NO: 3 - DNA, 6120 bp, Artificial Sequence
  Plasmid DNA: VRC 7703
tcgcgcgtttcggtgatgacggtgaaaacctctgacacatgcagctcccggagacggtcacagcttgtctgtaagcggatgccgggagcagacaagcccgtcagggcgcgtcagcgggtgttggcgggtgtcggggctggcttaactatgcggcatcagagcagattgtactgagagtgcaccatatgcggtgtgaaataccgcacagatgcgtaaggagaaaataccgcatcagattggctattggccattgcatacgttgtatccatatcataatatgtacatttatattggctcatgtccaacattaccgccatgttgacattgattattgactagttattaatagtaatcaattacggggtcattagttcatagcccatatatggagttccgcgttacataacttacggtaaatggcccgcctggctgaccgcccaacgacccccgcccattgacgtcaataatgacgtatgttcccatagtaacgccaatagggactttccattgacgtcaatgggtggagtatttacggtaaactgcccacttggcagtacatcaagtgtatcatatgccaagtacgccccctattgacgtcaatgacggtaaatggcccgcctggcattatgcccagtacatgaccttatgggactttcctacttggcagtacatctacgtattagtcatcgctattaccatggtgatgcggttttggcagtacatcaatgggcgtggatagcggtttgactcacggggatttccaagtctccaccccattgacgtcaatgggagtttgttttggcaccaaaatcaacgggactttccaaaatgtcgtaacaactccgccccattgacgcaaatgggcggtaggcgtgtacggtgggaggtctatataagcagagctcgtttagtgaaccgtcagatcgcctggagacgccatccacgctgttttgacctccatagaagacaccgggaccgatccagcctccatcggctcgcatctctccttcacgcgcccgccgccctacctgaggccgccatccacgccggttgagtcgcgttctgccgcctcccgcctgtggtgcctcctgaactgcgtccgccgtctaggtaagtttaaagctcaggtcgagaccgggcctttgtccggcgctcccttggagcctacctagactcagccggctctccacgctttgcctgaccctgcttgctcaactctagttaacggtggagggcagtgtagtctgagcagtactcgttgctgccgcgcgcgccaccagacataatagctgacagactaacagactgttcctttccatgggtcttttctgcagtcaccgtcgtcgacacgatccgatatcgccgccaccatgaaggccaatctgctggtgctgctgtgcgccctggccgccgccgatgccgatacaatctgcatcggataccacgccaataatagcacagatacagtggatacagtgctggagaagaatgtgacagtgacacacagcgtgaatctgctggaggatagccacaatggaaagctgtgcagactgaagggaatcgctcctctgcagctgggaaagtgcaatatcgccggatggctgctgggaaatcctgagtgcgatcctctgctgcctgtgagaagctggagctacatcgtggagacacctaatagcgagaatggaatctgctaccctggagattttatcgattacgaggagctgagagagcagctgagcagcgtgagcagctttgagagatttgagatctttcctaaggagagcagctggcctaatcacaatacaacaaagggagtgacagccgcctgcagccacgccggaaagagcagcttttacagaaatctgctgtggctgacagagaaggagggaagctaccctaagctgaagaatagctacgtgaataagaagggaaaggaggtgctggtgctgtggggaatccaccaccctagcaatagcaaggatcagcagaatatctaccagaatgagaatgcctacgtgagcgtggtgacaagcaattacaatagaagatttacacctgagatcgccgagagacctaaggtgagagatcaggccggaagaatgaattactactggacactgctgaagcctggagatacaatcatctttgaggccaatggaaatctgatcgctcctagatacgcctttgccctgagcagaggatttggaagcggaatcatcacaagcaatgccagcatgcacgagtgcaatacaaagtgccagacacctctgggagccatcaatagcagcctgccttttcagaatatccaccctgtgacaatcggagagtgccctaagtacgtgagaagcgccaagctgagaatggtgacaggactgagaaatatccctcagagagagacgagaggactgtttggagccatcgccggatttatcgagggaggatggacaggaatgatcgatggatggtacggataccaccaccagaatgagcagggaagcggatacgccgccgatcagaagagcacacagaatgccatcaatggaatcacaaataaggtgaatagcgtgatcgagaagatgaatatccagtttacagccgtgggaaaggagtttaataagctggagaagagaatggagaatctgaataagaaggtggatgatggatttctggatatctggacatacaatgccgagctgctggtgctgctggagaatgagagaacactggattttcacgatagcaatgtgaagaatctgtacgagaaggtgaagagccagctgaagaataatgccaaggagatcggaaatggatgctttgagttttaccacaagtgcgataatgagtgcatggagagcgtgagaaatggaacatacgattaccctaagtacagcgaggagagcaagctgaatagagagaaggtggatggagtgaagctggagagcatgggaatctaccagatcctggccatctacagcacagtggccagcagcctggtgctgctggtgagcctgggagccatcagcttttggatgtgcagcaatggaagcctgcagtgcagaatctgcatctgagcggccgctctagaccaggccctggatccagatctgctgtgccttctagttgccagccatctgttgtttgcccctcccccgtgccttccttgaccctggaaggtgccactcccactgtcctttcctaataaaatgaggaaattgcatcgcattgtctgagtaggtgtcattctattctggggggtggggtggggcaggacagcaagggggaggattgggaagacaatagcaggcatgctggggatgcggtgggctctatgggtacccaggtgctgaagaattgacccggttcctcctgggccagaaagaagcaggcacatccccttctctgtgacacaccctgtccacgcccctggttcttagttccagccccactcataggacactcatagctcaggagggctccgccttcaatcccacccgctaaagtacttggagcggtctctccctccctcatcagcccaccaaaccaaacctagcctccaagagtgggaagaaattaaagcaagataggctattaagtgcagagggagagaaaatgcctccaacatgtgaggaagtaatgagagaaatcatagaattttaaggccatgatttaaggccatcatggccttaatcttccgcttcctcgctcactgactcgctgcgctcggtcgttcggctgcggcgagcggtatcagctcactcaaaggcggtaatacggttatccacagaatcaggggataacgcaggaaagaacatgtgagcaaaaggccagcaaaaggccaggaaccgtaaaaaggccgcgttgctggcgtttttccataggctccgcccccctgacgagcatcacaaaaatcgacgctcaagtcagaggtggcgaaacccgacaggactataaagataccaggcgtttccccctggaagctccctcgtgcgctctcctgttccgaccctgccgcttaccggatacctgtccgcctttctcccttcgggaagcgtggcgctttctcatagctcacgctgtaggtatctcagttcggtgtaggtcgttcgctccaagctgggctgtgtgcacgaaccccccgttcagcccgaccgctgcgccttatccggtaactatcgtcttgagtccaacccggtaagacacgacttatcgccactggcagcagccactggtaacaggattagcagagcgaggtatgtaggcggtgctacagagttcttgaagtggtggcctaactacggctacactagaagaacagtatttggtatctgcgctctgctgaagccagttaccttcggaaaaagagttggtagctcttgatccggcaaacaaaccaccgctggtagcggtggtttttttgtttgcaagcagcagattacgcgcagaaaaaaaggatctcaagaagatcctttgatcttttctacggggtctgacgctcagtggaacgaaaactcacgttaagggattttggtcatgagattatcaaaaaggatcttcacctagatccttttaaattaaaaatgaagttttaaatcaatctaaagtatatatgagtaaacttggtctgacagttaccaatgcttaatcagtgaggcacctatctcagcgatctgtctatttcgttcatccatagttgcctgactcggggggggggggcgctgaggtctgcctcgtgaagaaggtgttgctgactcataccaggcctgaatcgccccatcatccagccagaaagtgagggagccacggttgatgagagctttgttgtaggtggaccagttggtgattttgaacttttgctttgccacggaacggtctgcgttgtcgggaagatgcgtgatctgatccttcaactcagcaaaagttcgatttattcaacaaagccgccgtcccgtcaagtcagcgtaatgctctgccagtgttacaaccaattaaccaattctgattagaaaaactcatcgagcatcaaatgaaactgcaatttattcatatcaggattatcaataccatatttttgaaaaagccgtttctgtaatgaaggagaaaactcaccgaggcagttccataggatggcaagatcctggtatcggtctgcgattccgactcgtccaacatcaatacaacctattaatttcccctcgtcaaaaataaggttatcaagtgagaaatcaccatgagtgacgactgaatccggtgagaatggcaaaagcttatgcatttctttccagacttgttcaacaggccagccattacgctcgtcatcaaaatcactcgcatcaaccaaaccgttattcattcgtgattgcgcctgagcgagacgaaatacgcgatcgctgttaaaaggacaattacaaacaggaatcgaatgcaaccggcgcaggaacactgccagcgcatcaacaatattttcacctgaatcaggatattcttctaatacctggaatgctgttttcccggggatcgcagtggtgagtaaccatgcatcatcaggagtacggataaaatgcttgatggtcggaagaggcataaattccgtcagccagtttagtctgaccatctcatctgtaacatcattggcaacgctacctttgccatgtttcagaaacaactctggcgcatcgggcttcccatacaatcgatagattgtcgcacctgattgcccgacattatcgcgagcccatttatacccatataaatcagcatccatgttggaatttaatcgcggcctcgagcaagacgtttcccgttgaatatggctcataacaccccttgtattactgtttatgtaagcagacagttttattgttcatgatgatatatttttatcttgtgcaatgtaacatcagagattttgagacacaacgtggctttccccccccccccattattgaagcatttatcagggttattgtctcatgagcggatacatatttgaatgtatttagaaaaataaacaaataggggttccgcgcacatttccccgaaaagtgccacctgacgtctaagaaaccattattatcatgacattaacctataaaaataggcgtatcacgaggccctttcgtc

SEQ ID NO: 4 - DNA, 6123 bp, Artificial Sequence
  Plasmid DNA: VRC 7704
tcgcgcgtttcggtgatgacggtgaaaacctctgacacatgcagctcccggagacggtcacagcttgtctgtaagcggatgccgggagcagacaagcccgtcagggcgcgtcagcgggtgttggcgggtgtcggggctggcttaactatgcggcatcagagcagattgtactgagagtgcaccatatgcggtgtgaaataccgcacagatgcgtaaggagaaaataccgcatcagattggctattggccattgcatacgttgtatccatatcataatatgtacatttatattggctcatgtccaacattaccgccatgttgacattgattattgactagttattaatagtaatcaattacggggtcattagttcatagcccatatatggagttccgcgttacataacttacggtaaatggcccgcctggctgaccgcccaacgacccccgcccattgacgtcaataatgacgtatgttcccatagtaacgccaatagggactttccattgacgtcaatgggtggagtatttacggtaaactgcccacttggcagtacatcaagtgtatcatatgccaagtacgccccctattgacgtcaatgacggtaaatggcccgcctggcattatgcccagtacatgaccttatgggactttcctacttggcagtacatctacgtattagtcatcgctattaccatggtgatgcggttttggcagtacatcaatgggcgtggatagcggtttgactcacggggatttccaagtctccaccccattgacgtcaatgggagtttgttttggcaccaaaatcaacgggactttccaaaatgtcgtaacaactccgccccattgacgcaaatgggcggtaggcgtgtacggtgggaggtctatataagcagagctcgtttagtgaaccgtcagatcgcctggagacgccatccacgctgttttgacctccatagaagacaccgggaccgatccagcctccatcggctcgcatctctccttcacgcgcccgccgccctacctgaggccgccatccacgccggttgagtcgcgttctgccgcctcccgcctgtggtgcctcctgaactgcgtccgccgtctaggtaagtttaaagctcaggtcgagaccgggcctttgtccggcgctcccttggagcctacctagactcagccggctctccacgctttgcctgaccctgcttgctcaactctagttaacggtggagggcagtgtagtctgagcagtactcgttgctgccgcgcgcgccaccagacataatagctgacagactaacagactgttcctttccatgggtcttttctgcagtcaccgtcgtcgacacgatccgatatcgccgccaccatgaaggccaatctgctggtgctgctgtgcgccctggccgccgccgatgccgatacaatctgcatcggataccacgccaataatagcacagatacagtggatacagtgctggagaagaatgtgacagtgacacacagcgtgaatctgctggaggatagccacaatggaaagctgtgcagactgaagggaatcgctcctctgcagctgggaaagtgcaatatcgccggatggctgctgggaaatcctgagtgcgatcctctgctgcctgtgagaagctggagctacatcgtggagacacctaatagcgagaatggaatctgctaccctggagattttatcgattacgaggagctgagagagcagctgagcagcgtgagcagctttgagagatttgagatctttcctaaggagagcagctggcctaatcacaatacaacaaagggagtgacagccgcctgcagccacgccggaaagagcagcttttacagaaatctgctgtggctgacagagaaggagggaagctaccctaagctgaagaatagctacgtgaataagaagggaaaggaggtgctggtgctgtggggaatccaccaccctagcaatagcaaggatcagcagaatatctaccagaatgagaatgcctacgtgagcgtggtgacaagcaattacaatagaagatttacacctgagatcgccgagagacctaaggtgagagatcaggccggaagaatgaattactactggacactgctgaagcctggagatacaatcatctttgaggccaatggaaatctgatcgctcctagatacgcctttgccctgagcagaggatttggaagcggaatcatcacaagcaatgccagcatgcacgagtgcaatacaaagtgccagacacctctgggagccatcaatagcagcctgccttttcagaatatccaccctgtgacaatcggagagtgccctaagtacgtgagaagcgccaagctgagaatggtgacaggactgagaaatatcggaggcggaggcggacagatcggactgtttggagccatcgccggatttatcgagggaggatggacaggaatgatcgatggatggtacggataccaccaccagaatgagcagggaagcggatacgccgccgatcagaagagcacacagaatgccatcaatggaatcacaaataaggtgaatagcgtgatcgagaagatgaatatccagtttacagccgtgggaaaggagtttaataagctggagaagagaatggagaatctgaataagaaggtggatgatggatttctggatatctggacatacaatgccgagctgctggtgctgctggagaatgagagaacactggattttcacgatagcaatgtgaagaatctgtacgagaaggtgaagagccagctgaagaataatgccaaggagatcggaaatggatgctttgagttttaccacaagtgcgataatgagtgcatggagagcgtgagaaatggaacatacgattaccctaagtacagcgaggagagcaagctgaatagagagaaggtggatggagtgaagctggagagcatgggaatctaccagatcctggccatctacagcacagtggccagcagcctggtgctgctggtgagcctgggagccatcagcttttggatgtgcagcaatggaagcctgcagtgcagaatctgcatctgagcggccgctctagaccaggccctggatccagatctgctgtgccttctagttgccagccatctgttgtttgcccctcccccgtgccttccttgaccctggaaggtgccactcccactgtcctttcctaataaaatgaggaaattgcatcgcattgtctgagtaggtgtcattctattctggggggtggggtggggcaggacagcaagggggaggattgggaagacaatagcaggcatgctggggatgcggtgggctctatgggtacccaggtgctgaagaattgacccggttcctcctgggccagaaagaagcaggcacatccccttctctgtgacacaccctgtccacgcccctggttcttagttccagccccactcataggacactcatagctcaggagggctccgccttcaatcccacccgctaaagtacttggagcggtctctccctccctcatcagcccaccaaaccaaacctagcctccaagagtgggaagaaattaaagcaagataggctattaagtgcagagggagagaaaatgcctccaacatgtgaggaagtaatgagagaaatcatagaattttaaggccatgatttaaggccatcatggccttaatcttccgcttcctcgctcactgactcgctgcgctcggtcgttcggctgcggcgagcggtatcagctcactcaaaggcggtaatacggttatccacagaatcaggggataacgcaggaaagaacatgtgagcaaaaggccagcaaaaggccaggaaccgtaaaaaggccgcgttgctggcgtttttccataggctccgcccccctgacgagcatcacaaaaatcgacgctcaagtcagaggtggcgaaacccgacaggactataaagataccaggcgtttccccctggaagctccctcgtgcgctctcctgttccgaccctgccgcttaccggatacctgtccgcctttctcccttcgggaagcgtggcgctttctcatagctcacgctgtaggtatctcagttcggtgtaggtcgttcgctccaagctgggctgtgtgcacgaaccccccgttcagcccgaccgctgcgccttatccggtaactatcgtcttgagtccaacccggtaagacacgacttatcgccactggcagcagccactggtaacaggattagcagagcgaggtatgtaggcggtgctacagagttcttgaagtggtggcctaactacggctacactagaagaacagtatttggtatctgcgctctgctgaagccagttaccttcggaaaaagagttggtagctcttgatccggcaaacaaaccaccgctggtagcggtggtttttttgtttgcaagcagcagattacgcgcagaaaaaaaggatctcaagaagatcctttgatcttttctacggggtctgacgctcagtggaacgaaaactcacgttaagggattttggtcatgagattatcaaaaaggatcttcacctagatccttttaaattaaaaatgaagttttaaatcaatctaaagtatatatgagtaaacttggtctgacagttaccaatgcttaatcagtgaggcacctatctcagcgatctgtctatttcgttcatccatagttgcctgactcggggggggggggcgctgaggtctgcctcgtgaagaaggtgttgctgactcataccaggcctgaatcgccccatcatccagccagaaagtgagggagccacggttgatgagagctttgttgtaggtggaccagttggtgattttgaacttttgctttgccacggaacggtctgcgttgtcgggaagatgcgtgatctgatccttcaactcagcaaaagttcgatttattcaacaaagccgccgtcccgtcaagtcagcgtaatgctctgccagtgttacaaccaattaaccaattctgattagaaaaactcatcgagcatcaaatgaaactgcaatttattcatatcaggattatcaataccatatttttgaaaaagccgtttctgtaatgaaggagaaaactcaccgaggcagttccataggatggcaagatcctggtatcggtctgcgattccgactcgtccaacatcaatacaacctattaatttcccctcgtcaaaaataaggttatcaagtgagaaatcaccatgagtgacgactgaatccggtgagaatggcaaaagcttatgcatttctttccagacttgttcaacaggccagccattacgctcgtcatcaaaatcactcgcatcaaccaaaccgttattcattcgtgattgcgcctgagcgagacgaaatacgcgatcgctgttaaaaggacaattacaaacaggaatcgaatgcaaccggcgcaggaacactgccagcgcatcaacaatattttcacctgaatcaggatattcttctaatacctggaatgctgttttcccggggatcgcagtggtgagtaaccatgcatcatcaggagtacggataaaatgcttgatggtcggaagaggcataaattccgtcagccagtttagtctgaccatctcatctgtaacatcattggcaacgctacctttgccatgtttcagaaacaactctggcgcatcgggcttcccatacaatcgatagattgtcgcacctgattgcccgacattatcgcgagcccatttatacccatataaatcagcatccatgttggaatttaatcgcggcctcgagcaagacgtttcccgttgaatatggctcataacaccccttgtattactgtttatgtaagcagacagttttattgttcatgatgatatatttttatcttgtgcaatgtaacatcagagattttgagacacaacgtggctttccccccccccccattattgaagcatttatcagggttattgtctcatgagcggatacatatttgaatgtatttagaaaaataaacaaataggggttccgcgcacatttccccgaaaagtgccacctgacgtctaagaaaccattattatcatgacattaacctataaaaataggcgtatcacgaggccctttcgtc

SEQ ID NO: 5 - DNA, 6126 bp, Artificial Sequence
  Plasmid DNA: VRC 7705
tcgcgcgtttcggtgatgacggtgaaaacctctgacacatgcagctcccggagacggtcacagcttgtctgtaagcggatgccgggagcagacaagcccgtcagggcgcgtcagcgggtgttggcgggtgtcggggctggcttaactatgcggcatcagagcagattgtactgagagtgcaccatatgcggtgtgaaataccgcacagatgcgtaaggagaaaataccgcatcagattggctattggccattgcatacgttgtatccatatcataatatgtacatttatattggctcatgtccaacattaccgccatgttgacattgattattgactagttattaatagtaatcaattacggggtcattagttcatagcccatatatggagttccgcgttacataacttacggtaaatggcccgcctggctgaccgcccaacgacccccgcccattgacgtcaataatgacgtatgttcccatagtaacgccaatagggactttccattgacgtcaatgggtggagtatttacggtaaactgcccacttggcagtacatcaagtgtatcatatgccaagtacgccccctattgacgtcaatgacggtaaatggcccgcctggcattatgcccagtacatgaccttatgggactttcctacttggcagtacatctacgtattagtcatcgctattaccatggtgatgcggttttggcagtacatcaatgggcgtggatagcggtttgactcacggggatttccaagtctccaccccattgacgtcaatgggagtttgttttggcaccaaaatcaacgggactttccaaaatgtcgtaacaactccgccccattgacgcaaatgggcggtaggcgtgtacggtgggaggtctatataagcagagctcgtttagtgaaccgtcagatcgcctggagacgccatccacgctgttttgacctccatagaagacaccgggaccgatccagcctccatcggctcgcatctctccttcacgcgcccgccgccctacctgaggccgccatccacgccggttgagtcgcgttctgccgcctcccgcctgtggtgcctcctgaactgcgtccgccgtctaggtaagtttaaagctcaggtcgagaccgggcctttgtccggcgctcccttggagcctacctagactcagccggctctccacgctttgcctgaccctgcttgctcaactctagttaacggtggagggcagtgtagtctgagcagtactcgttgctgccgcgcgcgccaccagacataatagctgacagactaacagactgttcctttccatgggtcttttctgcagtcaccgtcgtcgacacgatccgatatcgccgccaccatggagaagatcgtgctgctgttcgccatcgtgagcctggtgaagagcgatcagatctgcatcggataccacgccaataatagcacagagcaggtggatacaatcatggagaagaatgtgacagtgacacacgcccaggatatcctggagaagacacacaatggaaagctgtgcgatctggatggagtgaagcctctgatcctgagagattgcagcgtggccggatggctgctgggaaatcctatgtgcgatgagttcatcaatgtgcctgagtggagctacatcgtggagaaggccaatcctgtgaatgatctgtgctaccctggagatttcaatgattacgaggagctgaagcacctgctgagcagaatcaatcacttcgagaagatccagatcatccctaagagcagctggagcagccacgaggccagcctgggagtgagcagcgcctgcccttaccagagaaagagcagcttcttcagaaatgtggtgtggctgatcaagaagaatagcacataccctacaatcaagagaagctacaataatacaaatcaggaggatctgctggtgctgtggggaatccaccaccctaatgatgccgccgagcagacaaagctgtaccagaatcctacaacatacatcagcgtgggaacaagcacactgaatcagagactggtgcctagaatcgccacaagaagcaaggtgaatggacagagcggaagaatggagttcttctggacaatcctgaagcctaatgatgccatcaatttcgagagcaatggaaatttcatcgctcctgagtacgcctacaagatcgtgaagaagggagatagcacaatcatgaagagcgagctggagtacggaaattgcaatacaaagtgccagacacctatgggagccatcaatagcagcatgcctttccacaatatccaccctctgacaatcggagagtgccctaagtacgtgaagagcaatagactggtgctggccacaggactgagaaatagccctcagagagagagaagaagaaagaagagaggactgttcggagccatcgccggattcatcgagggaggatggcagggaatggtggatggatggtacggataccaccacagcaatgagcagggaagcggatacgccgccgataaggagagcacacagaaggccatcgatggagtgacaaataaggtgaatagcatcatcgataagatgaatacacagttcgaggccgtgggaagagagttcaataatctggagagaagaatcgagaatctgaataagaagatggaggatggattcctggatgtgtggacatacaatgccgagctgctggtgctgatggagaatgagagaacactggatttccacgatagcaatgtgaagaatctgtacgataaggtgagactgcagctgagagataatgccaaggagctgggaaatggatgcttcgagttctaccacaagtgcgataatgagtgcatggagagcgtgagaaatggaacatacgattaccctcagtacagcgaggaggccagactgaagagagaggagatcagcggagtgaagctggagagcatcggaatctaccagatcctgagcatctacagcacagtggccagcagcctggccctggccatcatggtggccggactgagcctgtggatgtgcagcaatggaagcctgcagtgcagaatctgcatctgagcggccgctctagaccaggccctggatccagatctgctgtgccttctagttgccagccatctgttgtttgcccctcccccgtgccttccttgaccctggaaggtgccactcccactgtcctttcctaataaaatgaggaaattgcatcgcattgtctgagtaggtgtcattctattctggggggtggggtggggcaggacagcaagggggaggattgggaagacaatagcaggcatgctggggatgcggtgggctctatgggtacccaggtgctgaagaattgacccggttcctcctgggccagaaagaagcaggcacatccccttctctgtgacacaccctgtccacgcccctggttcttagttccagccccactcataggacactcatagctcaggagggctccgccttcaatcccacccgctaaagtacttggagcggtctctccctccctcatcagcccaccaaaccaaacctagcctccaagagtgggaagaaattaaagcaagataggctattaagtgcagagggagagaaaatgcctccaacatgtgaggaagtaatgagagaaatcatagaattttaaggccatgatttaaggccatcatggccttaatcttccgcttcctcgctcactgactcgctgcgctcggtcgttcggctgcggcgagcggtatcagctcactcaaaggcggtaatacggttatccacagaatcaggggataacgcaggaaagaacatgtgagcaaaaggccagcaaaaggccaggaaccgtaaaaaggccgcgttgctggcgtttttccataggctccgcccccctgacgagcatcacaaaaatcgacgctcaagtcagaggtggcgaaacccgacaggactataaagataccaggcgtttccccctggaagctccctcgtgcgctctcctgttccgaccctgccgcttaccggatacctgtccgcctttctcccttcgggaagcgtggcgctttctcatagctcacgctgtaggtatctcagttcggtgtaggtcgttcgctccaagctgggctgtgtgcacgaaccccccgttcagcccgaccgctgcgccttatccggtaactatcgtcttgagtccaacccggtaagacacgacttatcgccactggcagcagccactggtaacaggattagcagagcgaggtatgtaggcggtgctacagagttcttgaagtggtggcctaactacggctacactagaagaacagtatttggtatctgcgctctgctgaagccagttaccttcggaaaaagagttggtagctcttgatccggcaaacaaaccaccgctggtagcggtggtttttttgtttgcaagcagcagattacgcgcagaaaaaaaggatctcaagaagatcctttgatcttttctacggggtctgacgctcagtggaacgaaaactcacgttaagggattttggtcatgagattatcaaaaaggatcttcacctagatccttttaaattaaaaatgaagttttaaatcaatctaaagtatatatgagtaaacttggtctgacagttaccaatgcttaatcagtgaggcacctatctcagcgatctgtctatttcgttcatccatagttgcctgactcggggggggggggcgctgaggtctgcctcgtgaagaaggtgttgctgactcataccaggcctgaatcgccccatcatccagccagaaagtgagggagccacggttgatgagagctttgttgtaggtggaccagttggtgattttgaacttttgctttgccacggaacggtctgcgttgtcgggaagatgcgtgatctgatccttcaactcagcaaaagttcgatttattcaacaaagccgccgtcccgtcaagtcagcgtaatgctctgccagtgttacaaccaattaaccaattctgattagaaaaactcatcgagcatcaaatgaaactgcaatttattcatatcaggattatcaataccatatttttgaaaaagccgtttctgtaatgaaggagaaaactcaccgaggcagttccataggatggcaagatcctggtatcggtctgcgattccgactcgtccaacatcaatacaacctattaatttcccctcgtcaaaaataaggttatcaagtgagaaatcaccatgagtgacgactgaatccggtgagaatggcaaaagcttatgcatttctttccagacttgttcaacaggccagccattacgctcgtcatcaaaatcactcgcatcaaccaaaccgttattcattcgtgattgcgcctgagcgagacgaaatacgcgatcgctgttaaaaggacaattacaaacaggaatcgaatgcaaccggcgcaggaacactgccagcgcatcaacaatattttcacctgaatcaggatattcttctaatacctggaatgctgttttcccggggatcgcagtggtgagtaaccatgcatcatcaggagtacggataaaatgcttgatggtcggaagaggcataaattccgtcagccagtttagtctgaccatctcatctgtaacatcattggcaacgctacctttgccatgtttcagaaacaactctggcgcatcgggcttcccatacaatcgatagattgtcgcacctgattgcccgacattatcgcgagcccatttatacccatataaatcagcatccatgttggaatttaatcgcggcctcgagcaagacgtttcccgttgaatatggctcataacaccccttgtattactgtttatgtaagcagacagttttattgttcatgatgatatatttttatcttgtgcaatgtaacatcagagattttgagacacaacgtggctttccccccccccccattattgaagcatttatcagggttattgtctcatgagcggatacatatttgaatgtatttagaaaaataaacaaataggggttccgcgcacatttccccgaaaagtgccacctgacgtctaagaaaccattattatcatgacattaacctataaaaataggcgtatcacgaggccctttcgtc

SEQ ID NO: 6 - DNA, 6114 bp, Artificial Sequence
  Plasmid DNA: VRC 7706
tcgcgcgtttcggtgatgacggtgaaaacctctgacacatgcagctcccggagacggtcacagcttgtctgtaagcggatgccgggagcagacaagcccgtcagggcgcgtcagcgggtgttggcgggtgtcggggctggcttaactatgcggcatcagagcagattgtactgagagtgcaccatatgcggtgtgaaataccgcacagatgcgtaaggagaaaataccgcatcagattggctattggccattgcatacgttgtatccatatcataatatgtacatttatattggctcatgtccaacattaccgccatgttgacattgattattgactagttattaatagtaatcaattacggggtcattagttcatagcccatatatggagttccgcgttacataacttacggtaaatggcccgcctggctgaccgcccaacgacccccgcccattgacgtcaataatgacgtatgttcccatagtaacgccaatagggactttccattgacgtcaatgggtggagtatttacggtaaactgcccacttggcagtacatcaagtgtatcatatgccaagtacgccccctattgacgtcaatgacggtaaatggcccgcctggcattatgcccagtacatgaccttatgggactttcctacttggcagtacatctacgtattagtcatcgctattaccatggtgatgcggttttggcagtacatcaatgggcgtggatagcggtttgactcacggggatttccaagtctccaccccattgacgtcaatgggagtttgttttggcaccaaaatcaacgggactttccaaaatgtcgtaacaactccgccccattgacgcaaatgggcggtaggcgtgtacggtgggaggtctatataagcagagctcgtttagtgaaccgtcagatcgcctggagacgccatccacgctgttttgacctccatagaagacaccgggaccgatccagcctccatcggctcgcatctctccttcacgcgcccgccgccctacctgaggccgccatccacgccggttgagtcgcgttctgccgcctcccgcctgtggtgcctcctgaactgcgtccgccgtctaggtaagtttaaagctcaggtcgagaccgggcctttgtccggcgctcccttggagcctacctagactcagccggctctccacgctttgcctgaccctgcttgctcaactctagttaacggtggagggcagtgtagtctgagcagtactcgttgctgccgcgcgcgccaccagacataatagctgacagactaacagactgttcctttccatgggtcttttctgcagtcaccgtcgtcgacacgatccgatatcgccgccaccatggagaagatcgtgctgctgttcgccatcgtgagcctggtgaagagcgatcagatctgcatcggataccacgccaataatagcacagagcaggtggatacaatcatggagaagaatgtgacagtgacacacgcccaggatatcctggagaagacacacaatggaaagctgtgcgatctggatggagtgaagcctctgatcctgagagattgcagcgtggccggatggctgctgggaaatcctatgtgcgatgagttcatcaatgtgcctgagtggagctacatcgtggagaaggccaatcctgtgaatgatctgtgctaccctggagatttcaatgattacgaggagctgaagcacctgctgagcagaatcaatcacttcgagaagatccagatcatccctaagagcagctggagcagccacgaggccagcctgggagtgagcagcgcctgcccttaccagagaaagagcagcttcttcagaaatgtggtgtggctgatcaagaagaatagcacataccctacaatcaagagaagctacaataatacaaatcaggaggatctgctggtgctgtggggaatccaccaccctaatgatgccgccgagcagacaaagctgtaccagaatcctacaacatacatcagcgtgggaacaagcacactgaatcagagactggtgcctagaatcgccacaagaagcaaggtgaatggacagagcggaagaatggagttcttctggacaatcctgaagcctaatgatgccatcaatttcgagagcaatggaaatttcatcgctcctgagtacgcctacaagatcgtgaagaagggagatagcacaatcatgaagagcgagctggagtacggaaattgcaatacaaagtgccagacacctatgggagccatcaatagcagcatgcctttccacaatatccaccctctgacaatcggagagtgccctaagtacgtgaagagcaatagactggtgctggccacaggactgagaaatagccctcagagagagacgagaggactgttcggagccatcgccggattcatcgagggaggatggcagggaatggtggatggatggtacggataccaccacagcaatgagcagggaagcggatacgccgccgataaggagagcacacagaaggccatcgatggagtgacaaataaggtgaatagcatcatcgataagatgaatacacagttcgaggccgtgggaagagagttcaataatctggagagaagaatcgagaatctgaataagaagatggaggatggattcctggatgtgtggacatacaatgccgagctgctggtgctgatggagaatgagagaacactggatttccacgatagcaatgtgaagaatctgtacgataaggtgagactgcagctgagagataatgccaaggagctgggaaatggatgcttcgagttctaccacaagtgcgataatgagtgcatggagagcgtgagaaatggaacatacgattaccctcagtacagcgaggaggccagactgaagagagaggagatcagcggagtgaagctggagagcatcggaatctaccagatcctgagcatctacagcacagtggccagcagcctggccctggccatcatggtggccggactgagcctgtggatgtgcagcaatggaagcctgcagtgcagaatctgcatctgagcggccgctctagaccaggccctggatccagatctgctgtgccttctagttgccagccatctgttgtttgcccctcccccgtgccttccttgaccctggaaggtgccactcccactgtcctttcctaataaaatgaggaaattgcatcgcattgtctgagtaggtgtcattctattctggggggtggggtggggcaggacagcaagggggaggattgggaagacaatagcaggcatgctggggatgcggtgggctctatgggtacccaggtgctgaagaattgacccggttcctcctgggccagaaagaagcaggcacatccccttctctgtgacacaccctgtccacgcccctggttcttagttccagccccactcataggacactcatagctcaggagggctccgccttcaatcccacccgctaaagtacttggagcggtctctccctccctcatcagcccaccaaaccaaacctagcctccaagagtgggaagaaattaaagcaagataggctattaagtgcagagggagagaaaatgcctccaacatgtgaggaagtaatgagagaaatcatagaattttaaggccatgatttaaggccatcatggccttaatcttccgcttcctcgctcactgactcgctgcgctcggtcgttcggctgcggcgagcggtatcagctcactcaaaggcggtaatacggttatccacagaatcaggggataacgcaggaaagaacatgtgagcaaaaggccagcaaaaggccaggaaccgtaaaaaggccgcgttgctggcgtttttccataggctccgcccccctgacgagcatcacaaaaatcgacgctcaagtcagaggtggcgaaacccgacaggactataaagataccaggcgtttccccctggaagctccctcgtgcgctctcctgttccgaccctgccgcttaccggatacctgtccgcctttctcccttcgggaagcgtggcgctttctcatagctcacgctgtaggtatctcagttcggtgtaggtcgttcgctccaagctgggctgtgtgcacgaaccccccgttcagcccgaccgctgcgccttatccggtaactatcgtcttgagtccaacccggtaagacacgacttatcgccactggcagcagccactggtaacaggattagcagagcgaggtatgtaggcggtgctacagagttcttgaagtggtggcctaactacggctacactagaagaacagtatttggtatctgcgctctgctgaagccagttaccttcggaaaaagagttggtagctcttgatccggcaaacaaaccaccgctggtagcggtggtttttttgtttgcaagcagcagattacgcgcagaaaaaaaggatctcaagaagatcctttgatcttttctacggggtctgacgctcagtggaacgaaaactcacgttaagggattttggtcatgagattatcaaaaaggatcttcacctagatccttttaaattaaaaatgaagttttaaatcaatctaaagtatatatgagtaaacttggtctgacagttaccaatgcttaatcagtgaggcacctatctcagcgatctgtctatttcgttcatccatagttgcctgactcggggggggggggcgctgaggtctgcctcgtgaagaaggtgttgctgactcataccaggcctgaatcgccccatcatccagccagaaagtgagggagccacggttgatgagagctttgttgtaggtggaccagttggtgattttgaacttttgctttgccacggaacggtctgcgttgtcgggaagatgcgtgatctgatccttcaactcagcaaaagttcgatttattcaacaaagccgccgtcccgtcaagtcagcgtaatgctctgccagtgttacaaccaattaaccaattctgattagaaaaactcatcgagcatcaaatgaaactgcaatttattcatatcaggattatcaataccatatttttgaaaaagccgtttctgtaatgaaggagaaaactcaccgaggcagttccataggatggcaagatcctggtatcggtctgcgattccgactcgtccaacatcaatacaacctattaatttcccctcgtcaaaaataaggttatcaagtgagaaatcaccatgagtgacgactgaatccggtgagaatggcaaaagcttatgcatttctttccagacttgttcaacaggccagccattacgctcgtcatcaaaatcactcgcatcaaccaaaccgttattcattcgtgattgcgcctgagcgagacgaaatacgcgatcgctgttaaaaggacaattacaaacaggaatcgaatgcaaccggcgcaggaacactgccagcgcatcaacaatattttcacctgaatcaggatattcttctaatacctggaatgctgttttcccggggatcgcagtggtgagtaaccatgcatcatcaggagtacggataaaatgcttgatggtcggaagaggcataaattccgtcagccagtttagtctgaccatctcatctgtaacatcattggcaacgctacctttgccatgtttcagaaacaactctggcgcatcgggcttcccatacaatcgatagattgtcgcacctgattgcccgacattatcgcgagcccatttatacccatataaatcagcatccatgttggaatttaatcgcggcctcgagcaagacgtttcccgttgaatatggctcataacaccccttgtattactgtttatgtaagcagacagttttattgttcatgatgatatatttttatcttgtgcaatgtaacatcagagattttgagacacaacgtggctttccccccccccccattattgaagcatttatcagggttattgtctcatgagcggatacatatttgaatgtatttagaaaaataaacaaataggggttccgcgcacatttccccgaaaagtgccacctgacgtctaagaaaccattattatcatgacattaacctataaaaataggcgtatcacgaggccctttcgtc

SEQ ID NO: 7 - DNA, 6117 bp, Artificial Sequence
  Plasmid DNA: VRC 7707
tcgcgcgtttcggtgatgacggtgaaaacctctgacacatgcagctcccggagacggtcacagcttgtctgtaagcggatgccgggagcagacaagcccgtcagggcgcgtcagcgggtgttggcgggtgtcggggctggcttaactatgcggcatcagagcagattgtactgagagtgcaccatatgcggtgtgaaataccgcacagatgcgtaaggagaaaataccgcatcagattggctattggccattgcatacgttgtatccatatcataatatgtacatttatattggctcatgtccaacattaccgccatgttgacattgattattgactagttattaatagtaatcaattacggggtcattagttcatagcccatatatggagttccgcgttacataacttacggtaaatggcccgcctggctgaccgcccaacgacccccgcccattgacgtcaataatgacgtatgttcccatagtaacgccaatagggactttccattgacgtcaatgggtggagtatttacggtaaactgcccacttggcagtacatcaagtgtatcatatgccaagtacgccccctattgacgtcaatgacggtaaatggcccgcctggcattatgcccagtacatgaccttatgggactttcctacttggcagtacatctacgtattagtcatcgctattaccatggtgatgcggttttggcagtacatcaatgggcgtggatagcggtttgactcacggggatttccaagtctccaccccattgacgtcaatgggagtttgttttggcaccaaaatcaacgggactttccaaaatgtcgtaacaactccgccccattgacgcaaatgggcggtaggcgtgtacggtgggaggtctatataagcagagctcgtttagtgaaccgtcagatcgcctggagacgccatccacgctgttttgacctccatagaagacaccgggaccgatccagcctccatcggctcgcatctctccttcacgcgcccgccgccctacctgaggccgccatccacgccggttgagtcgcgttctgccgcctcccgcctgtggtgcctcctgaactgcgtccgccgtctaggtaagtttaaagctcaggtcgagaccgggcctttgtccggcgctcccttggagcctacctagactcagccggctctccacgctttgcctgaccctgcttgctcaactctagttaacggtggagggcagtgtagtctgagcagtactcgttgctgccgcgcgcgccaccagacataatagctgacagactaacagactgttcctttccatgggtcttttctgcagtcaccgtcgtcgacacgatccgatatcgccgccaccatggagaagatcgtgctgctgttcgccatcgtgagcctggtgaagagcgatcagatctgcatcggataccacgccaataatagcacagagcaggtggatacaatcatggagaagaatgtgacagtgacacacgcccaggatatcctggagaagacacacaatggaaagctgtgcgatctggatggagtgaagcctctgatcctgagagattgcagcgtggccggatggctgctgggaaatcctatgtgcgatgagttcatcaatgtgcctgagtggagctacatcgtggagaaggccaatcctgtgaatgatctgtgctaccctggagatttcaatgattacgaggagctgaagcacctgctgagcagaatcaatcacttcgagaagatccagatcatccctaagagcagctggagcagccacgaggccagcctgggagtgagcagcgcctgcccttaccagagaaagagcagcttcttcagaaatgtggtgtggctgatcaagaagaatagcacataccctacaatcaagagaagctacaataatacaaatcaggaggatctgctggtgctgtggggaatccaccaccctaatgatgccgccgagcagacaaagctgtaccagaatcctacaacatacatcagcgtgggaacaagcacactgaatcagagactggtgcctagaatcgccacaagaagcaaggtgaatggacagagcggaagaatggagttcttctggacaatcctgaagcctaatgatgccatcaatttcgagagcaatggaaatttcatcgctcctgagtacgcctacaagatcgtgaagaagggagatagcacaatcatgaagagcgagctggagtacggaaattgcaatacaaagtgccagacacctatgggagccatcaatagcagcatgcctttccacaatatccaccctctgacaatcggagagtgccctaagtacgtgaagagcaatagactggtgctggccacaggactgagaaatagcggaggcggaggcggacagatcggactgttcggagccatcgccggattcatcgagggaggatggcagggaatggtggatggatggtacggataccaccacagcaatgagcagggaagcggatacgccgccgataaggagagcacacagaaggccatcgatggagtgacaaataaggtgaatagcatcatcgataagatgaatacacagttcgaggccgtgggaagagagttcaataatctggagagaagaatcgagaatctgaataagaagatggaggatggattcctggatgtgtggacatacaatgccgagctgctggtgctgatggagaatgagagaacactggatttccacgatagcaatgtgaagaatctgtacgataaggtgagactgcagctgagagataatgccaaggagctgggaaatggatgcttcgagttctaccacaagtgcgataatgagtgcatggagagcgtgagaaatggaacatacgattaccctcagtacagcgaggaggccagactgaagagagaggagatcagcggagtgaagctggagagcatcggaatctaccagatcctgagcatctacagcacagtggccagcagcctggccctggccatcatggtggccggactgagcctgtggatgtgcagcaatggaagcctgcagtgcagaatctgcatctgagcggccgctctagaccaggccctggatccagatctgctgtgccttctagttgccagccatctgttgtttgcccctcccccgtgccttccttgaccctggaaggtgccactcccactgtcctttcctaataaaatgaggaaattgcatcgcattgtctgagtaggtgtcattctattctggggggtggggtggggcaggacagcaagggggaggattgggaagacaatagcaggcatgctggggatgcggtgggctctatgggtacccaggtgctgaagaattgacccggttcctcctgggccagaaagaagcaggcacatccccttctctgtgacacaccctgtccacgcccctggttcttagttccagccccactcataggacactcatagctcaggagggctccgccttcaatcccacccgctaaagtacttggagcggtctctccctccctcatcagcccaccaaaccaaacctagcctccaagagtgggaagaaattaaagcaagataggctattaagtgcagagggagagaaaatgcctccaacatgtgaggaagtaatgagagaaatcatagaattttaaggccatgatttaaggccatcatggccttaatcttccgcttcctcgctcactgactcgctgcgctcggtcgttcggctgcggcgagcggtatcagctcactcaaaggcggtaatacggttatccacagaatcaggggataacgcaggaaagaacatgtgagcaaaaggccagcaaaaggccaggaaccgtaaaaaggccgcgttgctggcgtttttccataggctccgcccccctgacgagcatcacaaaaatcgacgctcaagtcagaggtggcgaaacccgacaggactataaagataccaggcgtttccccctggaagctccctcgtgcgctctcctgttccgaccctgccgcttaccggatacctgtccgcctttctcccttcgggaagcgtggcgctttctcatagctcacgctgtaggtatctcagttcggtgtaggtcgttcgctccaagctgggctgtgtgcacgaaccccccgttcagcccgaccgctgcgccttatccggtaactatcgtcttgagtccaacccggtaagacacgacttatcgccactggcagcagccactggtaacaggattagcagagcgaggtatgtaggcggtgctacagagttcttgaagtggtggcctaactacggctacactagaagaacagtatttggtatctgcgctctgctgaagccagttaccttcggaaaaagagttggtagctcttgatccggcaaacaaaccaccgctggtagcggtggtttttttgtttgcaagcagcagattacgcgcagaaaaaaaggatctcaagaagatcctttgatcttttctacggggtctgacgctcagtggaacgaaaactcacgttaagggattttggtcatgagattatcaaaaaggatcttcacctagatccttttaaattaaaaatgaagttttaaatcaatctaaagtatatatgagtaaacttggtctgacagttaccaatgcttaatcagtgaggcacctatctcagcgatctgtctatttcgttcatccatagttgcctgactcggggggggggggcgctgaggtctgcctcgtgaagaaggtgttgctgactcataccaggcctgaatcgccccatcatccagccagaaagtgagggagccacggttgatgagagctttgttgtaggtggaccagttggtgattttgaacttttgctttgccacggaacggtctgcgttgtcgggaagatgcgtgatctgatccttcaactcagcaaaagttcgatttattcaacaaagccgccgtcccgtcaagtcagcgtaatgctctgccagtgttacaaccaattaaccaattctgattagaaaaactcatcgagcatcaaatgaaactgcaatttattcatatcaggattatcaataccatatttttgaaaaagccgtttctgtaatgaaggagaaaactcaccgaggcagttccataggatggcaagatcctggtatcggtctgcgattccgactcgtccaacatcaatacaacctattaatttcccctcgtcaaaaataaggttatcaagtgagaaatcaccatgagtgacgactgaatccggtgagaatggcaaaagcttatgcatttctttccagacttgttcaacaggccagccattacgctcgtcatcaaaatcactcgcatcaaccaaaccgttattcattcgtgattgcgcctgagcgagacgaaatacgcgatcgctgttaaaaggacaattacaaacaggaatcgaatgcaaccggcgcaggaacactgccagcgcatcaacaatattttcacctgaatcaggatattcttctaatacctggaatgctgttttcccggggatcgcagtggtgagtaaccatgcatcatcaggagtacggataaaatgcttgatggtcggaagaggcataaattccgtcagccagtttagtctgaccatctcatctgtaacatcattggcaacgctacctttgccatgtttcagaaacaactctggcgcatcgggcttcccatacaatcgatagattgtcgcacctgattgcccgacattatcgcgagcccatttatacccatataaatcagcatccatgttggaatttaatcgcggcctcgagcaagacgtttcccgttgaatatggctcataacaccccttgtattactgtttatgtaagcagacagttttattgttcatgatgatatatttttatcttgtgcaatgtaacatcagagattttgagacacaacgtggctttccccccccccccattattgaagcatttatcagggttattgtctcatgagcggatacatatttgaatgtatttagaaaaataaacaaataggggttccgcgcacatttccccgaaaagtgccacctgacgtctaagaaaccattattatcatgacattaacctataaaaataggcgtatcacgaggccctttcgtc

SEQ ID NO: 8 - DNA, 5769 bp, Artificial Sequence
  Plasmid DNA: VRC 7708
tcgcgcgtttcggtgatgacggtgaaaacctctgacacatgcagctcccggagacggtcacagcttgtctgtaagcggatgccgggagcagacaagcccgtcagggcgcgtcagcgggtgttggcgggtgtcggggctggcttaactatgcggcatcagagcagattgtactgagagtgcaccatatgcggtgtgaaataccgcacagatgcgtaaggagaaaataccgcatcagattggctattggccattgcatacgttgtatccatatcataatatgtacatttatattggctcatgtccaacattaccgccatgttgacattgattattgactagttattaatagtaatcaattacggggtcattagttcatagcccatatatggagttccgcgttacataacttacggtaaatggcccgcctggctgaccgcccaacgacccccgcccattgacgtcaataatgacgtatgttcccatagtaacgccaatagggactttccattgacgtcaatgggtggagtatttacggtaaactgcccacttggcagtacatcaagtgtatcatatgccaagtacgccccctattgacgtcaatgacggtaaatggcccgcctggcattatgcccagtacatgaccttatgggactttcctacttggcagtacatctacgtattagtcatcgctattaccatggtgatgcggttttggcagtacatcaatgggcgtggatagcggtttgactcacggggatttccaagtctccaccccattgacgtcaatgggagtttgttttggcaccaaaatcaacgggactttccaaaatgtcgtaacaactccgccccattgacgcaaatgggcggtaggcgtgtacggtgggaggtctatataagcagagctcgtttagtgaaccgtcagatcgcctggagacgccatccacgctgttttgacctccatagaagacaccgggaccgatccagcctccatcggctcgcatctctccttcacgcgcccgccgccctacctgaggccgccatccacgccggttgagtcgcgttctgccgcctcccgcctgtggtgcctcctgaactgcgtccgccgtctaggtaagtttaaagctcaggtcgagaccgggcctttgtccggcgctcccttggagcctacctagactcagccggctctccacgctttgcctgaccctgcttgctcaactctagttaacggtggagggcagtgtagtctgagcagtactcgttgctgccgcgcgcgccaccagacataatagctgacagactaacagactgttcctttccatgggtcttttctgcagtcaccgtcgtcgacacgatccgatatcgccgccaccatgaatcctaataagaagatcatcacaatcggaagcatctgcatggtgacaggaatggtgagcctgatgctgcagatcggaaatctgatcagcatctgggtgagccacagcatccacacaggaaatcagcacaaggccgagcctatcagcaatacaaattttctgacagagaaggccgtggccagcgtgaagctggccggaaatagcagcctgtgccctatcaatggatgggccgtgtacagcaaggataatagcatcagaatcggaagcaagggagatgtgtttgtgatcagagagccttttatcagctgcagccacctggagtgcagaacattttttctgacacagggagccctgctgaatgataagcacagcaatggaacagtgaaggatagaagccctcacagaacactgatgagctgccctgtgggagaggcccctagcccttacaatagcagatttgagagcgtggcctggagcgccagcgcctgccacgatggaacaagctggctgacaatcggaatcagcggacctgataatggagccgtggccgtgctgaagtacaatggaatcatcacagatacaatcaagagctggagaaataatatcctgagaacacaggagagcgagtgcgcctgcgtgaatggaagctgctttacagtgatgacagatggacctagcaatggacaggccagccacaagatctttaagatggagaagggaaaggtggtgaagagcgtggagctggatgcccctaattaccactacgaggagtgcagctgctaccctgatgccggagagatcacatgcgtgtgcagagataattggcacggaagcaatagaccttgggtgagctttaatcagaatctggagtaccagatcggatacatctgcagcggagtgtttggagataatcctagacctaatgatggaacaggaagctgcggacctgtgagcagcaatggagcctacggagtgaagggatttagctttaagtacggaaatggagtgtggatcggaagaacaaagagcacaaatagcagaagcggatttgagatgatctgggaccctaatggatggacagagacagatagcagctttagcgtgaagcaggatatcgtggccatcacagattggagcggatacagcggaagctttgtgcagcaccctgagctgacaggactggattgcatcagaccttgcttttgggtggagctgatcagaggaagacctaaggagagcacaatctggacaagcggaagcagcatcagcttttgcggagtgaatagcgatacagtgggatggagctggcctgatggagccgagctgccttttacaatcgataagtgagcggccgctctagaccaggccctggatccagatctgctgtgccttctagttgccagccatctgttgtttgcccctcccccgtgccttccttgaccctggaaggtgccactcccactgtcctttcctaataaaatgaggaaattgcatcgcattgtctgagtaggtgtcattctattctggggggtggggtggggcaggacagcaagggggaggattgggaagacaatagcaggcatgctggggatgcggtgggctctatgggtacccaggtgctgaagaattgacccggttcctcctgggccagaaagaagcaggcacatccccttctctgtgacacaccctgtccacgcccctggttcttagttccagccccactcataggacactcatagctcaggagggctccgccttcaatcccacccgctaaagtacttggagcggtctctccctccctcatcagcccaccaaaccaaacctagcctccaagagtgggaagaaattaaagcaagataggctattaagtgcagagggagagaaaatgcctccaacatgtgaggaagtaatgagagaaatcatagaattttaaggccatgatttaaggccatcatggccttaatcttccgcttcctcgctcactgactcgctgcgctcggtcgttcggctgcggcgagcggtatcagctcactcaaaggcggtaatacggttatccacagaatcaggggataacgcaggaaagaacatgtgagcaaaaggccagcaaaaggccaggaaccgtaaaaaggccgcgttgctggcgtttttccataggctccgcccccctgacgagcatcacaaaaatcgacgctcaagtcagaggtggcgaaacccgacaggactataaagataccaggcgtttccccctggaagctccctcgtgcgctctcctgttccgaccctgccgcttaccggatacctgtccgcctttctcccttcgggaagcgtggcgctttctcatagctcacgctgtaggtatctcagttcggtgtaggtcgttcgctccaagctgggctgtgtgcacgaaccccccgttcagcccgaccgctgcgccttatccggtaactatcgtcttgagtccaacccggtaagacacgacttatcgccactggcagcagccactggtaacaggattagcagagcgaggtatgtaggcggtgctacagagttcttgaagtggtggcctaactacggctacactagaagaacagtatttggtatctgcgctctgctgaagccagttaccttcggaaaaagagttggtagctcttgatccggcaaacaaaccaccgctggtagcggtggtttttttgtttgcaagcagcagattacgcgcagaaaaaaaggatctcaagaagatcctttgatcttttctacggggtctgacgctcagtggaacgaaaactcacgttaagggattttggtcatgagattatcaaaaaggatcttcacctagatccttttaaattaaaaatgaagttttaaatcaatctaaagtatatatgagtaaacttggtctgacagttaccaatgcttaatcagtgaggcacctatctcagcgatctgtctatttcgttcatccatagttgcctgactcggggggggggggcgctgaggtctgcctcgtgaagaaggtgttgctgactcataccaggcctgaatcgccccatcatccagccagaaagtgagggagccacggttgatgagagctttgttgtaggtggaccagttggtgattttgaacttttgctttgccacggaacggtctgcgttgtcgggaagatgcgtgatctgatccttcaactcagcaaaagttcgatttattcaacaaagccgccgtcccgtcaagtcagcgtaatgctctgccagtgttacaaccaattaaccaattctgattagaaaaactcatcgagcatcaaatgaaactgcaatttattcatatcaggattatcaataccatatttttgaaaaagccgtttctgtaatgaaggagaaaactcaccgaggcagttccataggatggcaagatcctggtatcggtctgcgattccgactcgtccaacatcaatacaacctattaatttcccctcgtcaaaaataaggttatcaagtgagaaatcaccatgagtgacgactgaatccggtgagaatggcaaaagcttatgcatttctttccagacttgttcaacaggccagccattacgctcgtcatcaaaatcactcgcatcaaccaaaccgttattcattcgtgattgcgcctgagcgagacgaaatacgcgatcgctgttaaaaggacaattacaaacaggaatcgaatgcaaccggcgcaggaacactgccagcgcatcaacaatattttcacctgaatcaggatattcttctaatacctggaatgctgttttcccggggatcgcagtggtgagtaaccatgcatcatcaggagtacggataaaatgcttgatggtcggaagaggcataaattccgtcagccagtttagtctgaccatctcatctgtaacatcattggcaacgctacctttgccatgtttcagaaacaactctggcgcatcgggcttcccatacaatcgatagattgtcgcacctgattgcccgacattatcgcgagcccatttatacccatataaatcagcatccatgttggaatttaatcgcggcctcgagcaagacgtttcccgttgaatatggctcataacaccccttgtattactgtttatgtaagcagacagttttattgttcatgatgatatatttttatcttgtgcaatgtaacatcagagattttgagacacaacgtggctttccccccccccccattattgaagcatttatcagggttattgtctcatgagcggatacatatttgaatgtatttagaaaaataaacaaataggggttccgcgcacatttccccgaaaagtgccacctgacgtctaagaaaccattattatcatgacattaacctataaaaataggcgtatcacgaggccctttcgtc

SEQ ID NO: 9 - DNA, 4655 bp, Artificial Sequence
  Plasmid DNA: VRC 7712
tcgcgcgtttcggtgatgacggtgaaaacctctgacacatgcagctcccggagacggtcacagcttgtctgtaagcggatgccgggagcagacaagcccgtcagggcgcgtcagcgggtgttggcgggtgtcggggctggcttaactatgcggcatcagagcagattgtactgagagtgcaccatatgcggtgtgaaataccgcacagatgcgtaaggagaaaataccgcatcagattggctattggccattgcatacgttgtatccatatcataatatgtacatttatattggctcatgtccaacattaccgccatgttgacattgattattgactagttattaatagtaatcaattacggggtcattagttcatagcccatatatggagttccgcgttacataacttacggtaaatggcccgcctggctgaccgcccaacgacccccgcccattgacgtcaataatgacgtatgttcccatagtaacgccaatagggactttccattgacgtcaatgggtggagtatttacggtaaactgcccacttggcagtacatcaagtgtatcatatgccaagtacgccccctattgacgtcaatgacggtaaatggcccgcctggcattatgcccagtacatgaccttatgggactttcctacttggcagtacatctacgtattagtcatcgctattaccatggtgatgcggttttggcagtacatcaatgggcgtggatagcggtttgactcacggggatttccaagtctccaccccattgacgtcaatgggagtttgttttggcaccaaaatcaacgggactttccaaaatgtcgtaacaactccgccccattgacgcaaatgggcggtaggcgtgtacggtgggaggtctatataagcagagctcgtttagtgaaccgtcagatcgcctggagacgccatccacgctgttttgacctccatagaagacaccgggaccgatccagcctccatcggctcgcatctctccttcacgcgcccgccgccctacctgaggccgccatccacgccggttgagtcgcgttctgccgcctcccgcctgtggtgcctcctgaactgcgtccgccgtctaggtaagtttaaagctcaggtcgagaccgggcctttgtccggcgctcccttggagcctacctagactcagccggctctccacgctttgcctgaccctgcttgctcaactctagttaacggtggagggcagtgtagtctgagcagtactcgttgctgccgcgcgcgccaccagacataatagctgacagactaacagactgttcctttccatgggtcttttctgcagtcaccgtcgtcgacacgtgtgatcagatatcgcggccgctctagagatatcgccaccatgtctctgctgacagaagtggagacccccatcagaaatgagtggggctgcagatgtaatggcagcgaccggctgttcttcaagtgcatctaccggagattcaagtatggcctgaagggaggaccttctacagaaggcgtgcccaagtctatgagagaggagtacaggaaggaacagcagagcgccgtggatgccgatgatggacactttgtgagcatcgagctggagtgaacacgtgggatccagatctgctgtgccttctagttgccagccatctgttgtttgcccctcccccgtgccttccttgaccctggaaggtgccactcccactgtcctttcctaataaaatgaggaaattgcatcgcattgtctgagtaggtgtcattctattctggggggtggggtggggcaggacagcaagggggaggattgggaagacaatagcaggcatgctggggatgcggtgggctctatgggtacccaggtgctgaagaattgacccggttcctcctgggccagaaagaagcaggcacatccccttctctgtgacacaccctgtccacgcccctggttcttagttccagccccactcataggacactcatagctcaggagggctccgccttcaatcccacccgctaaagtacttggagcggtctctccctccctcatcagcccaccaaaccaaacctagcctccaagagtgggaagaaattaaagcaagataggctattaagtgcagagggagagaaaatgcctccaacatgtgaggaagtaatgagagaaatcatagaattttaaggccatgatttaaggccatcatggccttaatcttccgcttcctcgctcactgactcgctgcgctcggtcgttcggctgcggcgagcggtatcagctcactcaaaggcggtaatacggttatccacagaatcaggggataacgcaggaaagaacatgtgagcaaaaggccagcaaaaggccaggaaccgtaaaaaggccgcgttgctggcgtttttccataggctccgcccccctgacgagcatcacaaaaatcgacgctcaagtcagaggtggcgaaacccgacaggactataaagataccaggcgtttccccctggaagctccctcgtgcgctctcctgttccgaccctgccgcttaccggatacctgtccgcctttctcccttcgggaagcgtggcgctttctcatagctcacgctgtaggtatctcagttcggtgtaggtcgttcgctccaagctgggctgtgtgcacgaaccccccgttcagcccgaccgctgcgccttatccggtaactatcgtcttgagtccaacccggtaagacacgacttatcgccactggcagcagccactggtaacaggattagcagagcgaggtatgtaggcggtgctacagagttcttgaagtggtggcctaactacggctacactagaagaacagtatttggtatctgcgctctgctgaagccagttaccttcggaaaaagagttggtagctcttgatccggcaaacaaaccaccgctggtagcggtggtttttttgtttgcaagcagcagattacgcgcagaaaaaaaggatctcaagaagatcctttgatcttttctacggggtctgacgctcagtggaacgaaaactcacgttaagggattttggtcatgagattatcaaaaaggatcttcacctagatccttttaaattaaaaatgaagttttaaatcaatctaaagtatatatgagtaaacttggtctgacagttaccaatgcttaatcagtgaggcacctatctcagcgatctgtctatttcgttcatccatagttgcctgactcggggggggggggcgctgaggtctgcctcgtgaagaaggtgttgctgactcataccaggcctgaatcgccccatcatccagccagaaagtgagggagccacggttgatgagagctttgttgtaggtggaccagttggtgattttgaacttttgctttgccacggaacggtctgcgttgtcgggaagatgcgtgatctgatccttcaactcagcaaaagttcgatttattcaacaaagccgccgtcccgtcaagtcagcgtaatgctctgccagtgttacaaccaattaaccaattctgattagaaaaactcatcgagcatcaaatgaaactgcaatttattcatatcaggattatcaataccatatttttgaaaaagccgtttctgtaatgaaggagaaaactcaccgaggcagttccataggatggcaagatcctggtatcggtctgcgattccgactcgtccaacatcaatacaacctattaatttcccctcgtcaaaaataaggttatcaagtgagaaatcaccatgagtgacgactgaatccggtgagaatggcaaaagcttatgcatttctttccagacttgttcaacaggccagccattacgctcgtcatcaaaatcactcgcatcaaccaaaccgttattcattcgtgattgcgcctgagcgagacgaaatacgcgatcgctgttaaaaggacaattacaaacaggaatcgaatgcaaccggcgcaggaacactgccagcgcatcaacaatattttcacctgaatcaggatattcttctaatacctggaatgctgttttcccggggatcgcagtggtgagtaaccatgcatcatcaggagtacggataaaatgcttgatggtcggaagaggcataaattccgtcagccagtttagtctgaccatctcatctgtaacatcattggcaacgctacctttgccatgtttcagaaacaactctggcgcatcgggcttcccatacaatcgatagattgtcgcacctgattgcccgacattatcgcgagcccatttatacccatataaatcagcatccatgttggaatttaatcgcggcctcgagcaagacgtttcccgttgaatatggctcataacaccccttgtattactgtttatgtaagcagacagttttattgttcatgatgatatatttttatcttgtgcaatgtaacatcagagattttgagacacaacgtggctttccccccccccccattattgaagcatttatcagggttattgtctcatgagcggatacatatttgaatgtatttagaaaaataaacaaataggggttccgcgcacatttccccgaaaagtgccacctgacgtctaagaaaccattattatcatgacattaacctataaaaataggcgtatcacgaggccctttcgtc

SEQ ID NO: 10 - DNA, 4700 bp, Artificial Sequence
  Plasmid DNA: VRC 7713
tcgcgcgtttcggtgatgacggtgaaaacctctgacacatgcagctcccggagacggtcacagcttgtctgtaagcggatgccgggagcagacaagcccgtcagggcgcgtcagcgggtgttggcgggtgtcggggctggcttaactatgcggcatcagagcagattgtactgagagtgcaccatatgcggtgtgaaataccgcacagatgcgtaaggagaaaataccgcatcagattggctattggccattgcatacgttgtatccatatcataatatgtacatttatattggctcatgtccaacattaccgccatgttgacattgattattgactagttattaatagtaatcaattacggggtcattagttcatagcccatatatggagttccgcgttacataacttacggtaaatggcccgcctggctgaccgcccaacgacccccgcccattgacgtcaataatgacgtatgttcccatagtaacgccaatagggactttccattgacgtcaatgggtggagtatttacggtaaactgcccacttggcagtacatcaagtgtatcatatgccaagtacgccccctattgacgtcaatgacggtaaatggcccgcctggcattatgcccagtacatgaccttatgggactttcctacttggcagtacatctacgtattagtcatcgctattaccatggtgatgcggttttggcagtacatcaatgggcgtggatagcggtttgactcacggggatttccaagtctccaccccattgacgtcaatgggagtttgttttggcaccaaaatcaacgggactttccaaaatgtcgtaacaactccgccccattgacgcaaatgggcggtaggcgtgtacggtgggaggtctatataagcagagctcgtttagtgaaccgtcagatcgcctggagacgccatccacgctgttttgacctccatagaagacaccgggaccgatccagcctccatcggctcgcatctctccttcacgcgcccgccgccctacctgaggccgccatccacgccggttgagtcgcgttctgccgcctcccgcctgtggtgcctcctgaactgcgtccgccgtctaggtaagtttaaagctcaggtcgagaccgggcctttgtccggcgctcccttggagcctacctagactcagccggctctccacgctttgcctgaccctgcttgctcaactctagttaacggtggagggcagtgtagtctgagcagtactcgttgctgccgcgcgcgccaccagacataatagctgacagactaacagactgttcctttccatgggtcttttctgcagtcaccgtcgtcgacacgtgtgatcagatatcgcggccgctctagagatatcgccaccatgcagtacatcaaggccaacagcaagtttatcggcatcacagagctgtctctgctgacagaagtggagacccccatcagaaatgagtggggctgcagatgtaatggcagcgaccggctgttcttcaagtgcatctaccggagattcaagtatggcctgaagggaggaccttctacagaaggcgtgcccaagtctatgagagaggagtacaggaaggaacagcagagcgccgtggatgccgatgatggacactttgtgagcatcgagctggagtgaacacgtgggatccagatctgctgtgccttctagttgccagccatctgttgtttgcccctcccccgtgccttccttgaccctggaaggtgccactcccactgtcctttcctaataaaatgaggaaattgcatcgcattgtctgagtaggtgtcattctattctggggggtggggtggggcaggacagcaagggggaggattgggaagacaatagcaggcatgctggggatgcggtgggctctatgggtacccaggtgctgaagaattgacccggttcctcctgggccagaaagaagcaggcacatccccttctctgtgacacaccctgtccacgcccctggttcttagttccagccccactcataggacactcatagctcaggagggctccgccttcaatcccacccgctaaagtacttggagcggtctctccctccctcatcagcccaccaaaccaaacctagcctccaagagtgggaagaaattaaagcaagataggctattaagtgcagagggagagaaaatgcctccaacatgtgaggaagtaatgagagaaatcatagaattttaaggccatgatttaaggccatcatggccttaatcttccgcttcctcgctcactgactcgctgcgctcggtcgttcggctgcggcgagcggtatcagctcactcaaaggcggtaatacggttatccacagaatcaggggataacgcaggaaagaacatgtgagcaaaaggccagcaaaaggccaggaaccgtaaaaaggccgcgttgctggcgtttttccataggctccgcccccctgacgagcatcacaaaaatcgacgctcaagtcagaggtggcgaaacccgacaggactataaagataccaggcgtttccccctggaagctccctcgtgcgctctcctgttccgaccctgccgcttaccggatacctgtccgcctttctcccttcgggaagcgtggcgctttctcatagctcacgctgtaggtatctcagttcggtgtaggtcgttcgctccaagctgggctgtgtgcacgaaccccccgttcagcccgaccgctgcgccttatccggtaactatcgtcttgagtccaacccggtaagacacgacttatcgccactggcagcagccactggtaacaggattagcagagcgaggtatgtaggcggtgctacagagttcttgaagtggtggcctaactacggctacactagaagaacagtatttggtatctgcgctctgctgaagccagttaccttcggaaaaagagttggtagctcttgatccggcaaacaaaccaccgctggtagcggtggtttttttgtttgcaagcagcagattacgcgcagaaaaaaaggatctcaagaagatcctttgatcttttctacggggtctgacgctcagtggaacgaaaactcacgttaagggattttggtcatgagattatcaaaaaggatcttcacctagatccttttaaattaaaaatgaagttttaaatcaatctaaagtatatatgagtaaacttggtctgacagttaccaatgcttaatcagtgaggcacctatctcagcgatctgtctatttcgttcatccatagttgcctgactcggggggggggggcgctgaggtctgcctcgtgaagaaggtgttgctgactcataccaggcctgaatcgccccatcatccagccagaaagtgagggagccacggttgatgagagctttgttgtaggtggaccagttggtgattttgaacttttgctttgccacggaacggtctgcgttgtcgggaagatgcgtgatctgatccttcaactcagcaaaagttcgatttattcaacaaagccgccgtcccgtcaagtcagcgtaatgctctgccagtgttacaaccaattaaccaattctgattagaaaaactcatcgagcatcaaatgaaactgcaatttattcatatcaggattatcaataccatatttttgaaaaagccgtttctgtaatgaaggagaaaactcaccgaggcagttccataggatggcaagatcctggtatcggtctgcgattccgactcgtccaacatcaatacaacctattaatttcccctcgtcaaaaataaggttatcaagtgagaaatcaccatgagtgacgactgaatccggtgagaatggcaaaagcttatgcatttctttccagacttgttcaacaggccagccattacgctcgtcatcaaaatcactcgcatcaaccaaaccgttattcattcgtgattgcgcctgagcgagacgaaatacgcgatcgctgttaaaaggacaattacaaacaggaatcgaatgcaaccggcgcaggaacactgccagcgcatcaacaatattttcacctgaatcaggatattcttctaatacctggaatgctgttttcccggggatcgcagtggtgagtaaccatgcatcatcaggagtacggataaaatgcttgatggtcggaagaggcataaattccgtcagccagtttagtctgaccatctcatctgtaacatcattggcaacgctacctttgccatgtttcagaaacaactctggcgcatcgggcttcccatacaatcgatagattgtcgcacctgattgcccgacattatcgcgagcccatttatacccatataaatcagcatccatgttggaatttaatcgcggcctcgagcaagacgtttcccgttgaatatggctcataacaccccttgtattactgtttatgtaagcagacagttttattgttcatgatgatatatttttatcttgtgcaatgtaacatcagagattttgagacacaacgtggctttccccccccccccattattgaagcatttatcagggttattgtctcatgagcggatacatatttgaatgtatttagaaaaataaacaaataggggttccgcgcacatttccccgaaaagtgccacctgacgtctaagaaaccattattatcatgacattaacctataaaaataggcgtatcacgaggccctttcgtc

SEQ ID NO: 11 - DNA, 4763 bp, Artificial Sequence
  Plasmid DNA: VRC 7714
tcgcgcgtttcggtgatgacggtgaaaacctctgacacatgcagctcccggagacggtcacagcttgtctgtaagcggatgccgggagcagacaagcccgtcagggcgcgtcagcgggtgttggcgggtgtcggggctggcttaactatgcggcatcagagcagattgtactgagagtgcaccatatgcggtgtgaaataccgcacagatgcgtaaggagaaaataccgcatcagattggctattggccattgcatacgttgtatccatatcataatatgtacatttatattggctcatgtccaacattaccgccatgttgacattgattattgactagttattaatagtaatcaattacggggtcattagttcatagcccatatatggagttccgcgttacataacttacggtaaatggcccgcctggctgaccgcccaacgacccccgcccattgacgtcaataatgacgtatgttcccatagtaacgccaatagggactttccattgacgtcaatgggtggagtatttacggtaaactgcccacttggcagtacatcaagtgtatcatatgccaagtacgccccctattgacgtcaatgacggtaaatggcccgcctggcattatgcccagtacatgaccttatgggactttcctacttggcagtacatctacgtattagtcatcgctattaccatggtgatgcggttttggcagtacatcaatgggcgtggatagcggtttgactcacggggatttccaagtctccaccccattgacgtcaatgggagtttgttttggcaccaaaatcaacgggactttccaaaatgtcgtaacaactccgccccattgacgcaaatgggcggtaggcgtgtacggtgggaggtctatataagcagagctcgtttagtgaaccgtcagatcgcctggagacgccatccacgctgttttgacctccatagaagacaccgggaccgatccagcctccatcggctcgcatctctccttcacgcgcccgccgccctacctgaggccgccatccacgccggttgagtcgcgttctgccgcctcccgcctgtggtgcctcctgaactgcgtccgccgtctaggtaagtttaaagctcaggtcgagaccgggcctttgtccggcgctcccttggagcctacctagactcagccggctctccacgctttgcctgaccctgcttgctcaactctagttaacggtggagggcagtgtagtctgagcagtactcgttgctgccgcgcgcgccaccagacataatagctgacagactaacagactgttcctttccatgggtcttttctgcagtcaccgtcgtcgacacgtgtgatcagatatcgcggccgctctagagatatcgccaccatgcagtacatcaaggccaacagcaagtttatcggcatcacagagctgtctctgctgacagaagtggagacccccatcagaaatgagtggggctgcagatgtaatggcagcagcgatcctctggccatcgccgccaatatcatcggcatcctgcacctgatcctgtggattctggacaggctgttcttcaagtgcatctaccggagattcaagtatggcctgaagggaggaccttctacagaaggcgtgcccaagtctatgagagaggagtacaggaaggaacagcagagcgccgtggatgccgatgatggacactttgtgagcatcgagctggagtgaacacgtgggatccagatctgctgtgccttctagttgccagccatctgttgtttgcccctcccccgtgccttccttgaccctggaaggtgccactcccactgtcctttcctaataaaatgaggaaattgcatcgcattgtctgagtaggtgtcattctattctggggggtggggtggggcaggacagcaagggggaggattgggaagacaatagcaggcatgctggggatgcggtgggctctatgggtacccaggtgctgaagaattgacccggttcctcctgggccagaaagaagcaggcacatccccttctctgtgacacaccctgtccacgcccctggttcttagttccagccccactcataggacactcatagctcaggagggctccgccttcaatcccacccgctaaagtacttggagcggtctctccctccctcatcagcccaccaaaccaaacctagcctccaagagtgggaagaaattaaagcaagataggctattaagtgcagagggagagaaaatgcctccaacatgtgaggaagtaatgagagaaatcatagaattttaaggccatgatttaaggccatcatggccttaatcttccgcttcctcgctcactgactcgctgcgctcggtcgttcggctgcggcgagcggtatcagctcactcaaaggcggtaatacggttatccacagaatcaggggataacgcaggaaagaacatgtgagcaaaaggccagcaaaaggccaggaaccgtaaaaaggccgcgttgctggcgtttttccataggctccgcccccctgacgagcatcacaaaaatcgacgctcaagtcagaggtggcgaaacccgacaggactataaagataccaggcgtttccccctggaagctccctcgtgcgctctcctgttccgaccctgccgcttaccggatacctgtccgcctttctcccttcgggaagcgtggcgctttctcatagctcacgctgtaggtatctcagttcggtgtaggtcgttcgctccaagctgggctgtgtgcacgaaccccccgttcagcccgaccgctgcgccttatccggtaactatcgtcttgagtccaacccggtaagacacgacttatcgccactggcagcagccactggtaacaggattagcagagcgaggtatgtaggcggtgctacagagttcttgaagtggtggcctaactacggctacactagaagaacagtatttggtatctgcgctctgctgaagccagttaccttcggaaaaagagttggtagctcttgatccggcaaacaaaccaccgctggtagcggtggtttttttgtttgcaagcagcagattacgcgcagaaaaaaaggatctcaagaagatcctttgatcttttctacggggtctgacgctcagtggaacgaaaactcacgttaagggattttggtcatgagattatcaaaaaggatcttcacctagatccttttaaattaaaaatgaagttttaaatcaatctaaagtatatatgagtaaacttggtctgacagttaccaatgcttaatcagtgaggcacctatctcagcgatctgtctatttcgttcatccatagttgcctgactcggggggggggggcgctgaggtctgcctcgtgaagaaggtgttgctgactcataccaggcctgaatcgccccatcatccagccagaaagtgagggagccacggttgatgagagctttgttgtaggtggaccagttggtgattttgaacttttgctttgccacggaacggtctgcgttgtcgggaagatgcgtgatctgatccttcaactcagcaaaagttcgatttattcaacaaagccgccgtcccgtcaagtcagcgtaatgctctgccagtgttacaaccaattaaccaattctgattagaaaaactcatcgagcatcaaatgaaactgcaatttattcatatcaggattatcaataccatatttttgaaaaagccgtttctgtaatgaaggagaaaactcaccgaggcagttccataggatggcaagatcctggtatcggtctgcgattccgactcgtccaacatcaatacaacctattaatttcccctcgtcaaaaataaggttatcaagtgagaaatcaccatgagtgacgactgaatccggtgagaatggcaaaagcttatgcatttctttccagacttgttcaacaggccagccattacgctcgtcatcaaaatcactcgcatcaaccaaaccgttattcattcgtgattgcgcctgagcgagacgaaatacgcgatcgctgttaaaaggacaattacaaacaggaatcgaatgcaaccggcgcaggaacactgccagcgcatcaacaatattttcacctgaatcaggatattcttctaatacctggaatgctgttttcccggggatcgcagtggtgagtaaccatgcatcatcaggagtacggataaaatgcttgatggtcggaagaggcataaattccgtcagccagtttagtctgaccatctcatctgtaacatcattggcaacgctacctttgccatgtttcagaaacaactctggcgcatcgggcttcccatacaatcgatagattgtcgcacctgattgcccgacattatcgcgagcccatttatacccatataaatcagcatccatgttggaatttaatcgcggcctcgagcaagacgtttcccgttgaatatggctcataacaccccttgtattactgtttatgtaagcagacagttttattgttcatgatgatatatttttatcttgtgcaatgtaacatcagagattttgagacacaacgtggctttccccccccccccattattgaagcatttatcagggttattgtctcatgagcggatacatatttgaatgtatttagaaaaataaacaaataggggttccgcgcacatttccccgaaaagtgccacctgacgtctaagaaaccattattatcatgacattaacctataaaaataggcgtatcacgaggccctttcgtc

SEQ ID NO: 12 - DNA, 4718 bp, Artificial Sequence
  Plasmid DNA: VRC 7715
tcgcgcgtttcggtgatgacggtgaaaacctctgacacatgcagctcccggagacggtcacagcttgtctgtaagcggatgccgggagcagacaagcccgtcagggcgcgtcagcgggtgttggcgggtgtcggggctggcttaactatgcggcatcagagcagattgtactgagagtgcaccatatgcggtgtgaaataccgcacagatgcgtaaggagaaaataccgcatcagattggctattggccattgcatacgttgtatccatatcataatatgtacatttatattggctcatgtccaacattaccgccatgttgacattgattattgactagttattaatagtaatcaattacggggtcattagttcatagcccatatatggagttccgcgttacataacttacggtaaatggcccgcctggctgaccgcccaacgacccccgcccattgacgtcaataatgacgtatgttcccatagtaacgccaatagggactttccattgacgtcaatgggtggagtatttacggtaaactgcccacttggcagtacatcaagtgtatcatatgccaagtacgccccctattgacgtcaatgacggtaaatggcccgcctggcattatgcccagtacatgaccttatgggactttcctacttggcagtacatctacgtattagtcatcgctattaccatggtgatgcggttttggcagtacatcaatgggcgtggatagcggtttgactcacggggatttccaagtctccaccccattgacgtcaatgggagtttgttttggcaccaaaatcaacgggactttccaaaatgtcgtaacaactccgccccattgacgcaaatgggcggtaggcgtgtacggtgggaggtctatataagcagagctcgtttagtgaaccgtcagatcgcctggagacgccatccacgctgttttgacctccatagaagacaccgggaccgatccagcctccatcggctcgcatctctccttcacgcgcccgccgccctacctgaggccgccatccacgccggttgagtcgcgttctgccgcctcccgcctgtggtgcctcctgaactgcgtccgccgtctaggtaagtttaaagctcaggtcgagaccgggcctttgtccggcgctcccttggagcctacctagactcagccggctctccacgctttgcctgaccctgcttgctcaactctagttaacggtggagggcagtgtagtctgagcagtactcgttgctgccgcgcgcgccaccagacataatagctgacagactaacagactgttcctttccatgggtcttttctgcagtcaccgtcgtcgacacgtgtgatcagatatcgcggccgctctagagatatcgccaccatgtctctgctgacagaagtggagacccccatcagaaatgagtggggctgcagatgtaatggcagcagcgatcctctggccatcgccgccaatatcatcggcatcctgcacctgatcctgtggattctggacaggctgttcttcaagtgcatctaccggagattcaagtatggcctgaagggaggaccttctacagaaggcgtgcccaagtctatgagagaggagtacaggaaggaacagcagagcgccgtggatgccgatgatggacactttgtgagcatcgagctggagtgaacacgtgggatccagatctgctgtgccttctagttgccagccatctgttgtttgcccctcccccgtgccttccttgaccctggaaggtgccactcccactgtcctttcctaataaaatgaggaaattgcatcgcattgtctgagtaggtgtcattctattctggggggtggggtggggcaggacagcaagggggaggattgggaagacaatagcaggcatgctggggatgcggtgggctctatgggtacccaggtgctgaagaattgacccggttcctcctgggccagaaagaagcaggcacatccccttctctgtgacacaccctgtccacgcccctggttcttagttccagccccactcataggacactcatagctcaggagggctccgccttcaatcccacccgctaaagtacttggagcggtctctccctccctcatcagcccaccaaaccaaacctagcctccaagagtgggaagaaattaaagcaagataggctattaagtgcagagggagagaaaatgcctccaacatgtgaggaagtaatgagagaaatcatagaattttaaggccatgatttaaggccatcatggccttaatcttccgcttcctcgctcactgactcgctgcgctcggtcgttcggctgcggcgagcggtatcagctcactcaaaggcggtaatacggttatccacagaatcaggggataacgcaggaaagaacatgtgagcaaaaggccagcaaaaggccaggaaccgtaaaaaggccgcgttgctggcgtttttccataggctccgcccccctgacgagcatcacaaaaatcgacgctcaagtcagaggtggcgaaacccgacaggactataaagataccaggcgtttccccctggaagctccctcgtgcgctctcctgttccgaccctgccgcttaccggatacctgtccgcctttctcccttcgggaagcgtggcgctttctcatagctcacgctgtaggtatctcagttcggtgtaggtcgttcgctccaagctgggctgtgtgcacgaaccccccgttcagcccgaccgctgcgccttatccggtaactatcgtcttgagtccaacccggtaagacacgacttatcgccactggcagcagccactggtaacaggattagcagagcgaggtatgtaggcggtgctacagagttcttgaagtggtggcctaactacggctacactagaagaacagtatttggtatctgcgctctgctgaagccagttaccttcggaaaaagagttggtagctcttgatccggcaaacaaaccaccgctggtagcggtggtttttttgtttgcaagcagcagattacgcgcagaaaaaaaggatctcaagaagatcctttgatcttttctacggggtctgacgctcagtggaacgaaaactcacgttaagggattttggtcatgagattatcaaaaaggatcttcacctagatccttttaaattaaaaatgaagttttaaatcaatctaaagtatatatgagtaaacttggtctgacagttaccaatgcttaatcagtgaggcacctatctcagcgatctgtctatttcgttcatccatagttgcctgactcggggggggggggcgctgaggtctgcctcgtgaagaaggtgttgctgactcataccaggcctgaatcgccccatcatccagccagaaagtgagggagccacggttgatgagagctttgttgtaggtggaccagttggtgattttgaacttttgctttgccacggaacggtctgcgttgtcgggaagatgcgtgatctgatccttcaactcagcaaaagttcgatttattcaacaaagccgccgtcccgtcaagtcagcgtaatgctctgccagtgttacaaccaattaaccaattctgattagaaaaactcatcgagcatcaaatgaaactgcaatttattcatatcaggattatcaataccatatttttgaaaaagccgtttctgtaatgaaggagaaaactcaccgaggcagttccataggatggcaagatcctggtatcggtctgcgattccgactcgtccaacatcaatacaacctattaatttcccctcgtcaaaaataaggttatcaagtgagaaatcaccatgagtgacgactgaatccggtgagaatggcaaaagcttatgcatttctttccagacttgttcaacaggccagccattacgctcgtcatcaaaatcactcgcatcaaccaaaccgttattcattcgtgattgcgcctgagcgagacgaaatacgcgatcgctgttaaaaggacaattacaaacaggaatcgaatgcaaccggcgcaggaacactgccagcgcatcaacaatattttcacctgaatcaggatattcttctaatacctggaatgctgttttcccggggatcgcagtggtgagtaaccatgcatcatcaggagtacggataaaatgcttgatggtcggaagaggcataaattccgtcagccagtttagtctgaccatctcatctgtaacatcattggcaacgctacctttgccatgtttcagaaacaactctggcgcatcgggcttcccatacaatcgatagattgtcgcacctgattgcccgacattatcgcgagcccatttatacccatataaatcagcatccatgttggaatttaatcgcggcctcgagcaagacgtttcccgttgaatatggctcataacaccccttgtattactgtttatgtaagcagacagttttattgttcatgatgatatatttttatcttgtgcaatgtaacatcagagattttgagacacaacgtggctttccccccccccccattattgaagcatttatcagggttattgtctcatgagcggatacatatttgaatgtatttagaaaaataaacaaataggggttccgcgcacatttccccgaaaagtgccacctgacgtctaagaaaccattattatcatgacattaacctataaaaataggcgtatcacgaggccctttcgtc

SEQ ID NO: 13 - DNA, 4655 bp, Artificial Sequence
  Plasmid DNA: VRC 7716
tcgcgcgtttcggtgatgacggtgaaaacctctgacacatgcagctcccggagacggtcacagcttgtctgtaagcggatgccgggagcagacaagcccgtcagggcgcgtcagcgggtgttggcgggtgtcggggctggcttaactatgcggcatcagagcagattgtactgagagtgcaccatatgcggtgtgaaataccgcacagatgcgtaaggagaaaataccgcatcagattggctattggccattgcatacgttgtatccatatcataatatgtacatttatattggctcatgtccaacattaccgccatgttgacattgattattgactagttattaatagtaatcaattacggggtcattagttcatagcccatatatggagttccgcgttacataacttacggtaaatggcccgcctggctgaccgcccaacgacccccgcccattgacgtcaataatgacgtatgttcccatagtaacgccaatagggactttccattgacgtcaatgggtggagtatttacggtaaactgcccacttggcagtacatcaagtgtatcatatgccaagtacgccccctattgacgtcaatgacggtaaatggcccgcctggcattatgcccagtacatgaccttatgggactttcctacttggcagtacatctacgtattagtcatcgctattaccatggtgatgcggttttggcagtacatcaatgggcgtggatagcggtttgactcacggggatttccaagtctccaccccattgacgtcaatgggagtttgttttggcaccaaaatcaacgggactttccaaaatgtcgtaacaactccgccccattgacgcaaatgggcggtaggcgtgtacggtgggaggtctatataagcagagctcgtttagtgaaccgtcagatcgcctggagacgccatccacgctgttttgacctccatagaagacaccgggaccgatccagcctccatcggctcgcatctctccttcacgcgcccgccgccctacctgaggccgccatccacgccggttgagtcgcgttctgccgcctcccgcctgtggtgcctcctgaactgcgtccgccgtctaggtaagtttaaagctcaggtcgagaccgggcctttgtccggcgctcccttggagcctacctagactcagccggctctccacgctttgcctgaccctgcttgctcaactctagttaacggtggagggcagtgtagtctgagcagtactcgttgctgccgcgcgcgccaccagacataatagctgacagactaacagactgttcctttccatgggtcttttctgcagtcaccgtcgtcgacacgtgtgatcagatatcgcggccgctctagagatatcgccaccatgtctctgctgacagaagtggagacccctaccagaaatgagtgggagtgcagatgtagcgatagcgaccggctgttcttcaagtgcatctaccggagactgaagtatggactgaagagaggacctgccacagccggagtgcctgaatctatgcgggaggagtatagacaggaacagcagagcgccgtggatgtggatgatggccacttcgtgaatatcgagctggagtgaacacgtgggatccagatctgctgtgccttctagttgccagccatctgttgtttgcccctcccccgtgccttccttgaccctggaaggtgccactcccactgtcctttcctaataaaatgaggaaattgcatcgcattgtctgagtaggtgtcattctattctggggggtggggtggggcaggacagcaagggggaggattgggaagacaatagcaggcatgctggggatgcggtgggctctatgggtacccaggtgctgaagaattgacccggttcctcctgggccagaaagaagcaggcacatccccttctctgtgacacaccctgtccacgcccctggttcttagttccagccccactcataggacactcatagctcaggagggctccgccttcaatcccacccgctaaagtacttggagcggtctctccctccctcatcagcccaccaaaccaaacctagcctccaagagtgggaagaaattaaagcaagataggctattaagtgcagagggagagaaaatgcctccaacatgtgaggaagtaatgagagaaatcatagaattttaaggccatgatttaaggccatcatggccttaatcttccgcttcctcgctcactgactcgctgcgctcggtcgttcggctgcggcgagcggtatcagctcactcaaaggcggtaatacggttatccacagaatcaggggataacgcaggaaagaacatgtgagcaaaaggccagcaaaaggccaggaaccgtaaaaaggccgcgttgctggcgtttttccataggctccgcccccctgacgagcatcacaaaaatcgacgctcaagtcagaggtggcgaaacccgacaggactataaagataccaggcgtttccccctggaagctccctcgtgcgctctcctgttccgaccctgccgcttaccggatacctgtccgcctttctcccttcgggaagcgtggcgctttctcatagctcacgctgtaggtatctcagttcggtgtaggtcgttcgctccaagctgggctgtgtgcacgaaccccccgttcagcccgaccgctgcgccttatccggtaactatcgtcttgagtccaacccggtaagacacgacttatcgccactggcagcagccactggtaacaggattagcagagcgaggtatgtaggcggtgctacagagttcttgaagtggtggcctaactacggctacactagaagaacagtatttggtatctgcgctctgctgaagccagttaccttcggaaaaagagttggtagctcttgatccggcaaacaaaccaccgctggtagcggtggtttttttgtttgcaagcagcagattacgcgcagaaaaaaaggatctcaagaagatcctttgatcttttctacggggtctgacgctcagtggaacgaaaactcacgttaagggattttggtcatgagattatcaaaaaggatcttcacctagatccttttaaattaaaaatgaagttttaaatcaatctaaagtatatatgagtaaacttggtctgacagttaccaatgcttaatcagtgaggcacctatctcagcgatctgtctatttcgttcatccatagttgcctgactcggggggggggggcgctgaggtctgcctcgtgaagaaggtgttgctgactcataccaggcctgaatcgccccatcatccagccagaaagtgagggagccacggttgatgagagctttgttgtaggtggaccagttggtgattttgaacttttgctttgccacggaacggtctgcgttgtcgggaagatgcgtgatctgatccttcaactcagcaaaagttcgatttattcaacaaagccgccgtcccgtcaagtcagcgtaatgctctgccagtgttacaaccaattaaccaattctgattagaaaaactcatcgagcatcaaatgaaactgcaatttattcatatcaggattatcaataccatatttttgaaaaagccgtttctgtaatgaaggagaaaactcaccgaggcagttccataggatggcaagatcctggtatcggtctgcgattccgactcgtccaacatcaatacaacctattaatttcccctcgtcaaaaataaggttatcaagtgagaaatcaccatgagtgacgactgaatccggtgagaatggcaaaagcttatgcatttctttccagacttgttcaacaggccagccattacgctcgtcatcaaaatcactcgcatcaaccaaaccgttattcattcgtgattgcgcctgagcgagacgaaatacgcgatcgctgttaaaaggacaattacaaacaggaatcgaatgcaaccggcgcaggaacactgccagcgcatcaacaatattttcacctgaatcaggatattcttctaatacctggaatgctgttttcccggggatcgcagtggtgagtaaccatgcatcatcaggagtacggataaaatgcttgatggtcggaagaggcataaattccgtcagccagtttagtctgaccatctcatctgtaacatcattggcaacgctacctttgccatgtttcagaaacaactctggcgcatcgggcttcccatacaatcgatagattgtcgcacctgattgcccgacattatcgcgagcccatttatacccatataaatcagcatccatgttggaatttaatcgcggcctcgagcaagacgtttcccgttgaatatggctcataacaccccttgtattactgtttatgtaagcagacagttttattgttcatgatgatatatttttatcttgtgcaatgtaacatcagagattttgagacacaacgtggctttccccccccccccattattgaagcatttatcagggttattgtctcatgagcggatacatatttgaatgtatttagaaaaataaacaaataggggttccgcgcacatttccccgaaaagtgccacctgacgtctaagaaaccattattatcatgacattaacctataaaaataggcgtatcacgaggccctttcgtc

SEQ ID NO: 14 - DNA, 4700 bp, Artificial Sequence
  Plasmid DNA: VRC 7717
tcgcgcgtttcggtgatgacggtgaaaacctctgacacatgcagctcccggagacggtcacagcttgtctgtaagcggatgccgggagcagacaagcccgtcagggcgcgtcagcgggtgttggcgggtgtcggggctggcttaactatgcggcatcagagcagattgtactgagagtgcaccatatgcggtgtgaaataccgcacagatgcgtaaggagaaaataccgcatcagattggctattggccattgcatacgttgtatccatatcataatatgtacatttatattggctcatgtccaacattaccgccatgttgacattgattattgactagttattaatagtaatcaattacggggtcattagttcatagcccatatatggagttccgcgttacataacttacggtaaatggcccgcctggctgaccgcccaacgacccccgcccattgacgtcaataatgacgtatgttcccatagtaacgccaatagggactttccattgacgtcaatgggtggagtatttacggtaaactgcccacttggcagtacatcaagtgtatcatatgccaagtacgccccctattgacgtcaatgacggtaaatggcccgcctggcattatgcccagtacatgaccttatgggactttcctacttggcagtacatctacgtattagtcatcgctattaccatggtgatgcggttttggcagtacatcaatgggcgtggatagcggtttgactcacggggatttccaagtctccaccccattgacgtcaatgggagtttgttttggcaccaaaatcaacgggactttccaaaatgtcgtaacaactccgccccattgacgcaaatgggcggtaggcgtgtacggtgggaggtctatataagcagagctcgtttagtgaaccgtcagatcgcctggagacgccatccacgctgttttgacctccatagaagacaccgggaccgatccagcctccatcggctcgcatctctccttcacgcgcccgccgccctacctgaggccgccatccacgccggttgagtcgcgttctgccgcctcccgcctgtggtgcctcctgaactgcgtccgccgtctaggtaagtttaaagctcaggtcgagaccgggcctttgtccggcgctcccttggagcctacctagactcagccggctctccacgctttgcctgaccctgcttgctcaactctagttaacggtggagggcagtgtagtctgagcagtactcgttgctgccgcgcgcgccaccagacataatagctgacagactaacagactgttcctttccatgggtcttttctgcagtcaccgtcgtcgacacgtgtgatcagatatcgcggccgctctagagatatcgccaccatgcagtacatcaaggccaacagcaagtttatcggcatcacagagctgtctctgctgacagaagtggagacccctaccagaaatgagtgggagtgcagatgtagcgatagcgaccggctgttcttcaagtgcatctaccggagactgaagtatggactgaagagaggacctgccacagccggagtgcctgaatctatgcgggaggagtatagacaggaacagcagagcgccgtggatgtggatgatggccacttcgtgaatatcgagctggagtgaacacgtgggatccagatctgctgtgccttctagttgccagccatctgttgtttgcccctcccccgtgccttccttgaccctggaaggtgccactcccactgtcctttcctaataaaatgaggaaattgcatcgcattgtctgagtaggtgtcattctattctggggggtggggtggggcaggacagcaagggggaggattgggaagacaatagcaggcatgctggggatgcggtgggctctatgggtacccaggtgctgaagaattgacccggttcctcctgggccagaaagaagcaggcacatccccttctctgtgacacaccctgtccacgcccctggttcttagttccagccccactcataggacactcatagctcaggagggctccgccttcaatcccacccgctaaagtacttggagcggtctctccctccctcatcagcccaccaaaccaaacctagcctccaagagtgggaagaaattaaagcaagataggctattaagtgcagagggagagaaaatgcctccaacatgtgaggaagtaatgagagaaatcatagaattttaaggccatgatttaaggccatcatggccttaatcttccgcttcctcgctcactgactcgctgcgctcggtcgttcggctgcggcgagcggtatcagctcactcaaaggcggtaatacggttatccacagaatcaggggataacgcaggaaagaacatgtgagcaaaaggccagcaaaaggccaggaaccgtaaaaaggccgcgttgctggcgtttttccataggctccgcccccctgacgagcatcacaaaaatcgacgctcaagtcagaggtggcgaaacccgacaggactataaagataccaggcgtttccccctggaagctccctcgtgcgctctcctgttccgaccctgccgcttaccggatacctgtccgcctttctcccttcgggaagcgtggcgctttctcatagctcacgctgtaggtatctcagttcggtgtaggtcgttcgctccaagctgggctgtgtgcacgaaccccccgttcagcccgaccgctgcgccttatccggtaactatcgtcttgagtccaacccggtaagacacgacttatcgccactggcagcagccactggtaacaggattagcagagcgaggtatgtaggcggtgctacagagttcttgaagtggtggcctaactacggctacactagaagaacagtatttggtatctgcgctctgctgaagccagttaccttcggaaaaagagttggtagctcttgatccggcaaacaaaccaccgctggtagcggtggtttttttgtttgcaagcagcagattacgcgcagaaaaaaaggatctcaagaagatcctttgatcttttctacggggtctgacgctcagtggaacgaaaactcacgttaagggattttggtcatgagattatcaaaaaggatcttcacctagatccttttaaattaaaaatgaagttttaaatcaatctaaagtatatatgagtaaacttggtctgacagttaccaatgcttaatcagtgaggcacctatctcagcgatctgtctatttcgttcatccatagttgcctgactcggggggggggggcgctgaggtctgcctcgtgaagaaggtgttgctgactcataccaggcctgaatcgccccatcatccagccagaaagtgagggagccacggttgatgagagctttgttgtaggtggaccagttggtgattttgaacttttgctttgccacggaacggtctgcgttgtcgggaagatgcgtgatctgatccttcaactcagcaaaagttcgatttattcaacaaagccgccgtcccgtcaagtcagcgtaatgctctgccagtgttacaaccaattaaccaattctgattagaaaaactcatcgagcatcaaatgaaactgcaatttattcatatcaggattatcaataccatatttttgaaaaagccgtttctgtaatgaaggagaaaactcaccgaggcagttccataggatggcaagatcctggtatcggtctgcgattccgactcgtccaacatcaatacaacctattaatttcccctcgtcaaaaataaggttatcaagtgagaaatcaccatgagtgacgactgaatccggtgagaatggcaaaagcttatgcatttctttccagacttgttcaacaggccagccattacgctcgtcatcaaaatcactcgcatcaaccaaaccgttattcattcgtgattgcgcctgagcgagacgaaatacgcgatcgctgttaaaaggacaattacaaacaggaatcgaatgcaaccggcgcaggaacactgccagcgcatcaacaatattttcacctgaatcaggatattcttctaatacctggaatgctgttttcccggggatcgcagtggtgagtaaccatgcatcatcaggagtacggataaaatgcttgatggtcggaagaggcataaattccgtcagccagtttagtctgaccatctcatctgtaacatcattggcaacgctacctttgccatgtttcagaaacaactctggcgcatcgggcttcccatacaatcgatagattgtcgcacctgattgcccgacattatcgcgagcccatttatacccatataaatcagcatccatgttggaatttaatcgcggcctcgagcaagacgtttcccgttgaatatggctcataacaccccttgtattactgtttatgtaagcagacagttttattgttcatgatgatatatttttatcttgtgcaatgtaacatcagagattttgagacacaacgtggctttccccccccccccattattgaagcatttatcagggttattgtctcatgagcggatacatatttgaatgtatttagaaaaataaacaaataggggttccgcgcacatttccccgaaaagtgccacctgacgtctaagaaaccattattatcatgacattaacctataaaaataggcgtatcacgaggccctttcgtc

SEQ ID NO: 15 - DNA, 4763 bp, Artificial Sequence
  Plasmid DNA: VRC 7718
tcgcgcgtttcggtgatgacggtgaaaacctctgacacatgcagctcccggagacggtcacagcttgtctgtaagcggatgccgggagcagacaagcccgtcagggcgcgtcagcgggtgttggcgggtgtcggggctggcttaactatgcggcatcagagcagattgtactgagagtgcaccatatgcggtgtgaaataccgcacagatgcgtaaggagaaaataccgcatcagattggctattggccattgcatacgttgtatccatatcataatatgtacatttatattggctcatgtccaacattaccgccatgttgacattgattattgactagttattaatagtaatcaattacggggtcattagttcatagcccatatatggagttccgcgttacataacttacggtaaatggcccgcctggctgaccgcccaacgacccccgcccattgacgtcaataatgacgtatgttcccatagtaacgccaatagggactttccattgacgtcaatgggtggagtatttacggtaaactgcccacttggcagtacatcaagtgtatcatatgccaagtacgccccctattgacgtcaatgacggtaaatggcccgcctggcattatgcccagtacatgaccttatgggactttcctacttggcagtacatctacgtattagtcatcgctattaccatggtgatgcggttttggcagtacatcaatgggcgtggatagcggtttgactcacggggatttccaagtctccaccccattgacgtcaatgggagtttgttttggcaccaaaatcaacgggactttccaaaatgtcgtaacaactccgccccattgacgcaaatgggcggtaggcgtgtacggtgggaggtctatataagcagagctcgtttagtgaaccgtcagatcgcctggagacgccatccacgctgttttgacctccatagaagacaccgggaccgatccagcctccatcggctcgcatctctccttcacgcgcccgccgccctacctgaggccgccatccacgccggttgagtcgcgttctgccgcctcccgcctgtggtgcctcctgaactgcgtccgccgtctaggtaagtttaaagctcaggtcgagaccgggcctttgtccggcgctcccttggagcctacctagactcagccggctctccacgctttgcctgaccctgcttgctcaactctagttaacggtggagggcagtgtagtctgagcagtactcgttgctgccgcgcgcgccaccagacataatagctgacagactaacagactgttcctttccatgggtcttttctgcagtcaccgtcgtcgacacgtgtgatcagatatcgcggccgctctagagatatcgccaccatgcagtacatcaaggccaacagcaagtttatcggcatcacagagctgtctctgctgacagaagtggagacccctaccagaaatgagtgggagtgcagatgtagcgatagcagcgatcctatcgtggtggccgccaatatcattggaatcctgcacctgatcctgtggattctggacaggctgttcttcaagtgcatctaccggagactgaagtatggactgaagagaggacctgccacagccggagtgcctgaatctatgcgggaggagtatagacaggaacagcagagcgccgtggatgtggatgatggccacttcgtgaatatcgagctggagtgaacacgtgggatccagatctgctgtgccttctagttgccagccatctgttgtttgcccctcccccgtgccttccttgaccctggaaggtgccactcccactgtcctttcctaataaaatgaggaaattgcatcgcattgtctgagtaggtgtcattctattctggggggtggggtggggcaggacagcaagggggaggattgggaagacaatagcaggcatgctggggatgcggtgggctctatgggtacccaggtgctgaagaattgacccggttcctcctgggccagaaagaagcaggcacatccccttctctgtgacacaccctgtccacgcccctggttcttagttccagccccactcataggacactcatagctcaggagggctccgccttcaatcccacccgctaaagtacttggagcggtctctccctccctcatcagcccaccaaaccaaacctagcctccaagagtgggaagaaattaaagcaagataggctattaagtgcagagggagagaaaatgcctccaacatgtgaggaagtaatgagagaaatcatagaattttaaggccatgatttaaggccatcatggccttaatcttccgcttcctcgctcactgactcgctgcgctcggtcgttcggctgcggcgagcggtatcagctcactcaaaggcggtaatacggttatccacagaatcaggggataacgcaggaaagaacatgtgagcaaaaggccagcaaaaggccaggaaccgtaaaaaggccgcgttgctggcgtttttccataggctccgcccccctgacgagcatcacaaaaatcgacgctcaagtcagaggtggcgaaacccgacaggactataaagataccaggcgtttccccctggaagctccctcgtgcgctctcctgttccgaccctgccgcttaccggatacctgtccgcctttctcccttcgggaagcgtggcgctttctcatagctcacgctgtaggtatctcagttcggtgtaggtcgttcgctccaagctgggctgtgtgcacgaaccccccgttcagcccgaccgctgcgccttatccggtaactatcgtcttgagtccaacccggtaagacacgacttatcgccactggcagcagccactggtaacaggattagcagagcgaggtatgtaggcggtgctacagagttcttgaagtggtggcctaactacggctacactagaagaacagtatttggtatctgcgctctgctgaagccagttaccttcggaaaaagagttggtagctcttgatccggcaaacaaaccaccgctggtagcggtggtttttttgtttgcaagcagcagattacgcgcagaaaaaaaggatctcaagaagatcctttgatcttttctacggggtctgacgctcagtggaacgaaaactcacgttaagggattttggtcatgagattatcaaaaaggatcttcacctagatccttttaaattaaaaatgaagttttaaatcaatctaaagtatatatgagtaaacttggtctgacagttaccaatgcttaatcagtgaggcacctatctcagcgatctgtctatttcgttcatccatagttgcctgactcggggggggggggcgctgaggtctgcctcgtgaagaaggtgttgctgactcataccaggcctgaatcgccccatcatccagccagaaagtgagggagccacggttgatgagagctttgttgtaggtggaccagttggtgattttgaacttttgctttgccacggaacggtctgcgttgtcgggaagatgcgtgatctgatccttcaactcagcaaaagttcgatttattcaacaaagccgccgtcccgtcaagtcagcgtaatgctctgccagtgttacaaccaattaaccaattctgattagaaaaactcatcgagcatcaaatgaaactgcaatttattcatatcaggattatcaataccatatttttgaaaaagccgtttctgtaatgaaggagaaaactcaccgaggcagttccataggatggcaagatcctggtatcggtctgcgattccgactcgtccaacatcaatacaacctattaatttcccctcgtcaaaaataaggttatcaagtgagaaatcaccatgagtgacgactgaatccggtgagaatggcaaaagcttatgcatttctttccagacttgttcaacaggccagccattacgctcgtcatcaaaatcactcgcatcaaccaaaccgttattcattcgtgattgcgcctgagcgagacgaaatacgcgatcgctgttaaaaggacaattacaaacaggaatcgaatgcaaccggcgcaggaacactgccagcgcatcaacaatattttcacctgaatcaggatattcttctaatacctggaatgctgttttcccggggatcgcagtggtgagtaaccatgcatcatcaggagtacggataaaatgcttgatggtcggaagaggcataaattccgtcagccagtttagtctgaccatctcatctgtaacatcattggcaacgctacctttgccatgtttcagaaacaactctggcgcatcgggcttcccatacaatcgatagattgtcgcacctgattgcccgacattatcgcgagcccatttatacccatataaatcagcatccatgttggaatttaatcgcggcctcgagcaagacgtttcccgttgaatatggctcataacaccccttgtattactgtttatgtaagcagacagttttattgttcatgatgatatatttttatcttgtgcaatgtaacatcagagattttgagacacaacgtggctttccccccccccccattattgaagcatttatcagggttattgtctcatgagcggatacatatttgaatgtatttagaaaaataaacaaataggggttccgcgcacatttccccgaaaagtgccacctgacgtctaagaaaccattattatcatgacattaacctataaaaataggcgtatcacgaggccctttcgtc

SEQ ID NO: 16 - DNA, 4718 bp, Artificial Sequence
  Plasmid DNA: VRC 7719
tcgcgcgtttcggtgatgacggtgaaaacctctgacacatgcagctcccggagacggtcacagcttgtctgtaagcggatgccgggagcagacaagcccgtcagggcgcgtcagcgggtgttggcgggtgtcggggctggcttaactatgcggcatcagagcagattgtactgagagtgcaccatatgcggtgtgaaataccgcacagatgcgtaaggagaaaataccgcatcagattggctattggccattgcatacgttgtatccatatcataatatgtacatttatattggctcatgtccaacattaccgccatgttgacattgattattgactagttattaatagtaatcaattacggggtcattagttcatagcccatatatggagttccgcgttacataacttacggtaaatggcccgcctggctgaccgcccaacgacccccgcccattgacgtcaataatgacgtatgttcccatagtaacgccaatagggactttccattgacgtcaatgggtggagtatttacggtaaactgcccacttggcagtacatcaagtgtatcatatgccaagtacgccccctattgacgtcaatgacggtaaatggcccgcctggcattatgcccagtacatgaccttatgggactttcctacttggcagtacatctacgtattagtcatcgctattaccatggtgatgcggttttggcagtacatcaatgggcgtggatagcggtttgactcacggggatttccaagtctccaccccattgacgtcaatgggagtttgttttggcaccaaaatcaacgggactttccaaaatgtcgtaacaactccgccccattgacgcaaatgggcggtaggcgtgtacggtgggaggtctatataagcagagctcgtttagtgaaccgtcagatcgcctggagacgccatccacgctgttttgacctccatagaagacaccgggaccgatccagcctccatcggctcgcatctctccttcacgcgcccgccgccctacctgaggccgccatccacgccggttgagtcgcgttctgccgcctcccgcctgtggtgcctcctgaactgcgtccgccgtctaggtaagtttaaagctcaggtcgagaccgggcctttgtccggcgctcccttggagcctacctagactcagccggctctccacgctttgcctgaccctgcttgctcaactctagttaacggtggagggcagtgtagtctgagcagtactcgttgctgccgcgcgcgccaccagacataatagctgacagactaacagactgttcctttccatgggtcttttctgcagtcaccgtcgtcgacacgtgtgatcagatatcgcggccgctctagagatatcgccaccatgtctctgctgacagaagtggagacccctaccagaaatgagtgggagtgcagatgtagcgatagcagcgatcctatcgtggtggccgccaatatcattggaatcctgcacctgatcctgtggattctggacaggctgttcttcaagtgcatctaccggagactgaagtatggactgaagagaggacctgccacagccggagtgcctgaatctatgcgggaggagtatagacaggaacagcagagcgccgtggatgtggatgatggccacttcgtgaatatcgagctggagtgaacacgtgggatccagatctgctgtgccttctagttgccagccatctgttgtttgcccctcccccgtgccttccttgaccctggaaggtgccactcccactgtcctttcctaataaaatgaggaaattgcatcgcattgtctgagtaggtgtcattctattctggggggtggggtggggcaggacagcaagggggaggattgggaagacaatagcaggcatgctggggatgcggtgggctctatgggtacccaggtgctgaagaattgacccggttcctcctgggccagaaagaagcaggcacatccccttctctgtgacacaccctgtccacgcccctggttcttagttccagccccactcataggacactcatagctcaggagggctccgccttcaatcccacccgctaaagtacttggagcggtctctccctccctcatcagcccaccaaaccaaacctagcctccaagagtgggaagaaattaaagcaagataggctattaagtgcagagggagagaaaatgcctccaacatgtgaggaagtaatgagagaaatcatagaattttaaggccatgatttaaggccatcatggccttaatcttccgcttcctcgctcactgactcgctgcgctcggtcgttcggctgcggcgagcggtatcagctcactcaaaggcggtaatacggttatccacagaatcaggggataacgcaggaaagaacatgtgagcaaaaggccagcaaaaggccaggaaccgtaaaaaggccgcgttgctggcgtttttccataggctccgcccccctgacgagcatcacaaaaatcgacgctcaagtcagaggtggcgaaacccgacaggactataaagataccaggcgtttccccctggaagctccctcgtgcgctctcctgttccgaccctgccgcttaccggatacctgtccgcctttctcccttcgggaagcgtggcgctttctcatagctcacgctgtaggtatctcagttcggtgtaggtcgttcgctccaagctgggctgtgtgcacgaaccccccgttcagcccgaccgctgcgccttatccggtaactatcgtcttgagtccaacccggtaagacacgacttatcgccactggcagcagccactggtaacaggattagcagagcgaggtatgtaggcggtgctacagagttcttgaagtggtggcctaactacggctacactagaagaacagtatttggtatctgcgctctgctgaagccagttaccttcggaaaaagagttggtagctcttgatccggcaaacaaaccaccgctggtagcggtggtttttttgtttgcaagcagcagattacgcgcagaaaaaaaggatctcaagaagatcctttgatcttttctacggggtctgacgctcagtggaacgaaaactcacgttaagggattttggtcatgagattatcaaaaaggatcttcacctagatccttttaaattaaaaatgaagttttaaatcaatctaaagtatatatgagtaaacttggtctgacagttaccaatgcttaatcagtgaggcacctatctcagcgatctgtctatttcgttcatccatagttgcctgactcggggggggggggcgctgaggtctgcctcgtgaagaaggtgttgctgactcataccaggcctgaatcgccccatcatccagccagaaagtgagggagccacggttgatgagagctttgttgtaggtggaccagttggtgattttgaacttttgctttgccacggaacggtctgcgttgtcgggaagatgcgtgatctgatccttcaactcagcaaaagttcgatttattcaacaaagccgccgtcccgtcaagtcagcgtaatgctctgccagtgttacaaccaattaaccaattctgattagaaaaactcatcgagcatcaaatgaaactgcaatttattcatatcaggattatcaataccatatttttgaaaaagccgtttctgtaatgaaggagaaaactcaccgaggcagttccataggatggcaagatcctggtatcggtctgcgattccgactcgtccaacatcaatacaacctattaatttcccctcgtcaaaaataaggttatcaagtgagaaatcaccatgagtgacgactgaatccggtgagaatggcaaaagcttatgcatttctttccagacttgttcaacaggccagccattacgctcgtcatcaaaatcactcgcatcaaccaaaccgttattcattcgtgattgcgcctgagcgagacgaaatacgcgatcgctgttaaaaggacaattacaaacaggaatcgaatgcaaccggcgcaggaacactgccagcgcatcaacaatattttcacctgaatcaggatattcttctaatacctggaatgctgttttcccggggatcgcagtggtgagtaaccatgcatcatcaggagtacggataaaatgcttgatggtcggaagaggcataaattccgtcagccagtttagtctgaccatctcatctgtaacatcattggcaacgctacctttgccatgtttcagaaacaactctggcgcatcgggcttcccatacaatcgatagattgtcgcacctgattgcccgacattatcgcgagcccatttatacccatataaatcagcatccatgttggaatttaatcgcggcctcgagcaagacgtttcccgttgaatatggctcataacaccccttgtattactgtttatgtaagcagacagttttattgttcatgatgatatatttttatcttgtgcaatgtaacatcagagattttgagacacaacgtggctttccccccccccccattattgaagcatttatcagggttattgtctcatgagcggatacatatttgaatgtatttagaaaaataaacaaataggggttccgcgcacatttccccgaaaagtgccacctgacgtctaagaaaccattattatcatgacattaacctataaaaataggcgtatcacgaggccctttcgtc

SEQ ID NO: 17 - DNA, 6117 bp, Artificial Sequence
  Plasmid DNA: 53349
tcgcgcgtttcggtgatgacggtgaaaacctctgacacatgcagctcccggagacggtcacagcttgtctgtaagcggatgccgggagcagacaagcccgtcagggcgcgtcagcgggtgttggcgggtgtcggggctggcttaactatgcggcatcagagcagattgtactgagagtgcaccatatgcggtgtgaaataccgcacagatgcgtaaggagaaaataccgcatcagattggctattggccattgcatacgttgtatccatatcataatatgtacatttatattggctcatgtccaacattaccgccatgttgacattgattattgactagttattaatagtaatcaattacgggaacttccatagcccatatatggagttccgcgttacataacttacgggaatttccaaacctggctgaccgcccaacgacccccgcccattgacgtcaataatgacgtatgttcccatagtaacgccaatagggaacttccattgacgtcaatgggtggagtatttacggtaaactgcccacttgggaatttccaagtgtatcatatgccaagtacgccccctattgacgtcaatgacgggaacttccataagcttgcattatgcccagtacatgaccttatgggaatttcctacttggcagtacatctacgtattagtcatcgctattaccatggtgatgcggttttggcagtacatcaatgggcgtggatagcggtttgactcacgggaacttccaagtctccaccccattgacgtcaatgggagtttgttttgactcaccaaaatcaacgggaattcccaaaatgtcgtaacaactccgccccattgacgcaaatgggcggtaggcgtgtacggtgggaggtctatataagcagagctcgtttagtgaaccgtcagatcgcctggagacgccatccacgctgttttgacctccatagaagacaccgggaccgatccagcctccatcggctcgcatctctccttcacgcgcccgccgccctacctgaggccgccatccacgccggttgagtcgcgttctgccgcctcccgcctgtggtgcctcctgaactgcgtccgccgtctaggtaagtttaaagctcaggtcgagaccgggcctttgtccggcgctcccttggagcctacctagactcagccggctctccacgctttgcctgaccctgcttgctcaactctagttaacggtggagggcagtgtagtctgagcagtactcgttgctgccgcgcgcgccaccagacataatagctgacagactaacagactgttcctttccatgggtcttttctgcagtcaccgtcgtcgacacgtgtgatcagatatcgcggccgctctagagatatcgccaccatggagaagtttatcgccatcgccaccctggccagcacaaacgcctacgaccggatctgtatcggctaccagagcaacaacagcaccgacaccgtgaataccctgatcgagcagaacgtgcctgtgacccagacaatggaactggtggagaccgaaaagcaccccgcctactgtaatacagacctgggagcccctctggaactgagggactgtaagatcgaggccgtgatctacggcaaccccaagtgtgacatccacctgaaggatcagggctggagctacatcgtggagagacctagcgcccctgagggcatgtgttaccctggcagcgtggagaatctggaggagctgagattcgtgtttagcagcgccgccagctacaagaggatcaggctgttcgactacagcaggtggaacgtgacaagaagcggcaccagcaaggcctgtaatgccagcacaggcggccagagcttctacaggagcatcaactggctgaccaagaaggagcccgacacctacgatttcaacgagggcgcctacgtgaataacgaggacggcgacatcatctttctgtggggcatccaccaccctccagataccaaggagcagaccaccctgtacaagaacgccaacaccctgtctagcgtgaccaccaacaccatcaacaggagcttccagcccaatatcggccctagacctctggtgagaggccagcagggcagaatggattactactggggcatcctgaagagaggcgagaccctgaagatcaggaccaacggcaatctgatcgcccctgagtttggctatctgctgaagggcgagagctacggcagaatcatccagaacgaggacatccccatcggcaactgtaacaccaagtgccagacctatgccggagccatcaacagcagcaagcccttccagaatgccagcaggcactacatgggcgagtgccccaagtatgtgaagaaggccagcctgagactggctgtgggcctgagaaatacccctcagagggagaccagaggactgtttggagccatcgccggattcatcgagggaggatggagcggaatgatcgatggctggtacggcttccaccacagcaattctgagggcacaggaatggccgccgatcagaagtctacacaggaggccatcgacaagatcaccaacaaggtgaacaacatcgtggacaagatgaaccgggagttcgaggtggtgaaccacgagtttagcgaggtggagaagcggatcaacatgatcaacgacaagatcgacgaccagatcgaagatctgtgggcctacaatgccgaactgctggtgctgctggagaaccagaaaaccctggacgagcacgacagcaacgtgaagaacctgttcgacgaggtgaagaggagactgagcgccaatgccatcgatgccggaaacggctgctttgacatcctgcacaagtgtgataacgagtgtatggagaccatcaagaacggcacctacgaccacaaggagtatgaggaggaggccaagctggagaggagcaagatcaacagcggcagactggtgcctagaggatctcctggcagcggatatattcctgaggcccctagagatggacaggcctatgtgagaaaggatggcgaatgggtgctgctgtctacatttctgggacaccaccatcaccaccattgatgaacacgtgggatccagatctgctgtgccttctagttgccagccatctgttgtttgcccctcccccgtgccttccttgaccctggaaggtgccactcccactgtcctttcctaataaaatgaggaaattgcatcgcattgtctgagtaggtgtcattctattctggggggtggggtggggcaggacagcaagggggaggattgggaagacaatagcaggcatgctggggatgcggtgggctctatgggtacccaggtgctgaagaattgacccggttcctcctgggccagaaagaagcaggcacatccccttctctgtgacacaccctgtccacgcccctggttcttagttccagccccactcataggacactcatagctcaggagggctccgccttcaatcccacccgctaaagtacttggagcggtctctccctccctcatcagcccaccaaaccaaacctagcctccaagagtgggaagaaattaaagcaagataggctattaagtgcagagggagagaaaatgcctccaacatgtgaggaagtaatgagagaaatcatagaattttaaggccatgatttaaggccatcatggccttaatcttccgcttcctcgctcactgactcgctgcgctcggtcgttcggctgcggcgagcggtatcagctcactcaaaggcggtaatacggttatccacagaatcaggggataacgcaggaaagaacatgtgagcaaaaggccagcaaaaggccaggaaccgtaaaaaggccgcgttgctggcgtttttccataggctccgcccccctgacgagcatcacaaaaatcgacgctcaagtcagaggtggcgaaacccgacaggactataaagataccaggcgtttccccctggaagctccctcgtgcgctctcctgttccgaccctgccgcttaccggatacctgtccgcctttctcccttcgggaagcgtggcgctttctcatagctcacgctgtaggtatctcagttcggtgtaggtcgttcgctccaagctgggctgtgtgcacgaaccccccgttcagcccgaccgctgcgccttatccggtaactatcgtcttgagtccaacccggtaagacacgacttatcgccactggcagcagccactggtaacaggattagcagagcgaggtatgtaggcggtgctacagagttcttgaagtggtggcctaactacggctacactagaagaacagtatttggtatctgcgctctgctgaagccagttaccttcggaaaaagagttggtagctcttgatccggcaaacaaaccaccgctggtagcggtggtttttttgtttgcaagcagcagattacgcgcagaaaaaaaggatctcaagaagatcctttgatcttttctacggggtctgacgctcagtggaacgaaaactcacgttaagggattttggtcatgagattatcaaaaaggatcttcacctagatccttttaaattaaaaatgaagttttaaatcaatctaaagtatatatgagtaaacttggtctgacagttaccaatgcttaatcagtgaggcacctatctcagcgatctgtctatttcgttcatccatagttgcctgactcggggggggggggcgctgaggtctgcctcgtgaagaaggtgttgctgactcataccaggcctgaatcgccccatcatccagccagaaagtgagggagccacggttgatgagagctttgttgtaggtggaccagttggtgattttgaacttttgctttgccacggaacggtctgcgttgtcgggaagatgcgtgatctgatccttcaactcagcaaaagttcgatttattcaacaaagccgccgtcccgtcaagtcagcgtaatgctctgccagtgttacaaccaattaaccaattctgattagaaaaactcatcgagcatcaaatgaaactgcaatttattcatatcaggattatcaataccatatttttgaaaaagccgtttctgtaatgaaggagaaaactcaccgaggcagttccataggatggcaagatcctggtatcggtctgcgattccgactcgtccaacatcaatacaacctattaatttcccctcgtcaaaaataaggttatcaagtgagaaatcaccatgagtgacgactgaatccggtgagaatggcaaaagcttatgcatttctttccagacttgttcaacaggccagccattacgctcgtcatcaaaatcactcgcatcaaccaaaccgttattcattcgtgattgcgcctgagcgagacgaaatacgcgatcgctgttaaaaggacaattacaaacaggaatcgaatgcaaccggcgcaggaacactgccagcgcatcaacaatattttcacctgaatcaggatattcttctaatacctggaatgctgttttcccggggatcgcagtggtgagtaaccatgcatcatcaggagtacggataaaatgcttgatggtcggaagaggcataaattccgtcagccagtttagtctgaccatctcatctgtaacatcattggcaacgctacctttgccatgtttcagaaacaactctggcgcatcgggcttcccatacaatcgatagattgtcgcacctgattgcccgacattatcgcgagcccatttatacccatataaatcagcatccatgttggaatttaatcgcggcctcgagcaagacgtttcccgttgaatatggctcataacaccccttgtattactgtttatgtaagcagacagttttattgttcatgatgatatatttttatcttgtgcaatgtaacatcagagattttgagacacaacgtggctttccccccccccccattattgaagcatttatcagggttattgtctcatgagcggatacatatttgaatgtatttagaaaaataaacaaataggggttccgcgcacatttccccgaaaagtgccacctgacgtctaagaaaccattattatcatgacattaacctataaaaataggcgtatcacgaggccctttcgtc

SEQ ID NO: 18 - DNA, 6120 bp, Artificial Sequence
  Plasmid DNA: 53350
agcaaccagggcagcttctacagatccatgagatggctgaccctgaagagcggacagtttcccgtgcagaccgacgagtacaagaacacccgggacagcgacatcgtgtttacctgggccattcaccaccctcctaccagcgatgagcaggtgaagctgtacaagaaccctgacaccctgagcagcgtgacaaccgtggagatcaaccggagcttcaagcccaatatcggccctagacctctggtgagaggccagcagggcagaatggattactactgggccgtgctgaaacctggccagaccgtgaagatccagaccaacggcaatctgatcgcccctgagtatggccacctgatcacaggcaagagccacggcagaatcctgaagaacaacctgcctatgggccagtgtgtgaccgagtgccagctgaatgagggcgtgatgaacacctccaagcccttccagaataccagcaagcactacatcggcaagtgccccaagtacatccctagcggcagcctgaaactggccatcggcctgagaaatgtgcctcaggtgcaggacagaggactgtttggagccatcgccggattcatcgaaggaggatggcctggactggtcgccggatggtatggattccagcaccagaatgccgagggaacaggaattgccgccgacagagactctacacagcgggccatcgacaacatgcagaacaagctgaacaacgtgatcgacaagatgaacaagcagttcgaggtggtgaaccacgagtttagcgaggtggagagccggatcaacatgatcaacagcaagatcgacgaccagatcacagacatctgggcctacaatgccgaactgctggtgctgctggagaaccagaaaaccctggacgagcacgacgccaatgtgagaaacctgcacgacagagtgaggagagtgctgagggagaacgccatcgatacaggcgatggctgcttcgagatcctgcacaagtgtgacaacaactgtatggacaccatccggaacggcacctacaaccacaaggagtacgaggaggagtccaagatcgagcggcagaaagtgaatggcgtgaagctggaggagaactccacctacaagatcctgagcatctacagcagcgtggcctcttctctggtcctcctgctgatgatcatcggcggcttcatcttcggctgccagaacggcaatgtgaggtgtaccttctgtatctgatgaacacgtgggatccagatctgctgtgccttctagttgccagccatctgttgtttgcccctcccccgtgccttccttgaccctggaaggtgccactcccactgtcctttcctaataaaatgaggaaattgcatcgcattgtctgagtaggtgtcattctattctggggggtggggtggggcaggacagcaagggggaggattgggaagacaatagcaggcatgctggggatgcggtgggctctatgggtacccaggtgctgaagaattgacccggttcctcctgggccagaaagaagcaggcacatccccttctctgtgacacaccctgtccacgcccctggttcttagttccagccccactcataggacactcatagctcaggagggctccgccttcaatcccacccgctaaagtacttggagcggtctctccctccctcatcagcccaccaaaccaaacctagcctccaagagtgggaagaaattaaagcaagataggctattaagtgcagagggagagaaaatgcctccaacatgtgaggaagtaatgagagaaatcatagaattttaaggccatgatttaaggccatcatggccttaatcttccgcttcctcgctcactgactcgctgcgctcggtcgttcggctgcggcgagcggtatcagctcactcaaaggcggtaatacggttatccacagaatcaggggataacgcaggaaagaacatgtgagcaaaaggccagcaaaaggccaggaaccgtaaaaaggccgcgttgctggcgtttttccataggctccgcccccctgacgagcatcacaaaaatcgacgctcaagtcagaggtggcgaaacccgacaggactataaagataccaggcgtttccccctggaagctccctcgtgcgctctcctgttccgaccctgccgcttaccggatacctgtccgcctttctcccttcgggaagcgtggcgctttctcatagctcacgctgtaggtatctcagttcggtgtaggtcgttcgctccaagctgggctgtgtgcacgaaccccccgttcagcccgaccgctgcgccttatccggtaactatcgtcttgagtccaacccggtaagacacgacttatcgccactggcagcagccactggtaacaggattagcagagcgaggtatgtaggcggtgctacagagttcttgaagtggtggcctaactacggctacactagaagaacagtatttggtatctgcgctctgctgaagccagttaccttcggaaaaagagttggtagctcttgatccggcaaacaaaccaccgctggtagcggtggtttttttgtttgcaagcagcagattacgcgcagaaaaaaaggatctcaagaagatcctttgatcttttctacggggtctgacgctcagtggaacgaaaactcacgttaagggattttggtcatgagattatcaaaaaggatcttcacctagatccttttaaattaaaaatgaagttttaaatcaatctaaagtatatatgagtaaacttggtctgacagttaccaatgcttaatcagtgaggcacctatctcagcgatctgtctatttcgttcatccatagttgcctgactcggggggggggggcgctgaggtctgcctcgtgaagaaggtgttgctgactcataccaggcctgaatcgccccatcatccagccagaaagtgagggagccacggttgatgagagctttgttgtaggtggaccagttggtgattttgaacttttgctttgccacggaacggtctgcgttgtcgggaagatgcgtgatctgatccttcaactcagcaaaagttcgatttattcaacaaagccgccgtcccgtcaagtcagcgtaatgctctgccagtgttacaaccaattaaccaattctgattagaaaaactcatcgagcatcaaatgaaactgcaatttattcatatcaggattatcaataccatatttttgaaaaagccgtttctgtaatgaaggagaaaactcaccgaggcagttccataggatggcaagatcctggtatcggtctgcgattccgactcgtccaacatcaatacaacctattaatttcccctcgtcaaaaataaggttatcaagtgagaaatcaccatgagtgacgactgaatccggtgagaatggcaaaagcttatgcatttctttccagacttgttcaacaggccagccattacgctcgtcatcaaaatcactcgcatcaaccaaaccgttattcattcgtgattgcgcctgagcgagacgaaatacgcgatcgctgttaaaaggacaattacaaacaggaatcgaatgcaaccggcgcaggaacactgccagcgcatcaacaatattttcacctgaatcaggatattcttctaatacctggaatgctgttttcccggggatcgcagtggtgagtaaccatgcatcatcaggagtacggataaaatgcttgatggtcggaagaggcataaattccgtcagccagtttagtctgaccatctcatctgtaacatcattggcaacgctacctttgccatgtttcagaaacaactctggcgcatcgggcttcccatacaatcgatagattgtcgcacctgattgcccgacattatcgcgagcccatttatacccatataaatcagcatccatgttggaatttaatcgcggcctcgagcaagacgtttcccgttgaatatggctcataacaccccttgtattactgtttatgtaagcagacagttttattgttcatgatgatatatttttatcttgtgcaatgtaacatcagagattttgagacacaacgtggctttccccccccccccattattgaagcatttatcagggttattgtctcatgagcggatacatatttgaatgtatttagaaaaataaacaaataggggttccgcgcacatttccccgaaaagtgccacctgacgtctaagaaaccattattatcatgacattaacctataaaaataggcgtatcacgaggccctttcgtctcgcgcgtttcggtgatgacggtgaaaacctctgacacatgcagctcccggagacggtcacagcttgtctgtaagcggatgccgggagcagacaagcccgtcagggcgcgtcagcgggtgttggcgggtgtcggggctggcttaactatgcggcatcagagcagattgtactgagagtgcaccatatgcggtgtgaaataccgcacagatgcgtaaggagaaaataccgcatcagattggctattggccattgcatacgttgtatccatatcataatatgtacatttatattggctcatgtccaacattaccgccatgttgacattgattattgactagttattaatagtaatcaattacgggaacttccatagcccatatatggagttccgcgttacataacttacgggaatttccaaacctggctgaccgcccaacgacccccgcccattgacgtcaataatgacgtatgttcccatagtaacgccaatagggaacttccattgacgtcaatgggtggagtatttacggtaaactgcccacttgggaatttccaagtgtatcatatgccaagtacgccccctattgacgtcaatgacgggaacttccataagcttgcattatgcccagtacatgaccttatgggaatttcctacttggcagtacatctacgtattagtcatcgctattaccatggtgatgcggttttggcagtacatcaatgggcgtggatagcggtttgactcacgggaacttccaagtctccaccccattgacgtcaatgggagtttgttttgactcaccaaaatcaacgggaattcccaaaatgtcgtaacaactccgccccattgacgcaaatgggcggtaggcgtgtacggtgggaggtctatataagcagagctcgtttagtgaaccgtcagatcgcctggagacgccatccacgctgttttgacctccatagaagacaccgggaccgatccagcctccatcggctcgcatctctccttcacgcgcccgccgccctacctgaggccgccatccacgccggttgagtcgcgttctgccgcctcccgcctgtggtgcctcctgaactgcgtccgccgtctaggtaagtttaaagctcaggtcgagaccgggcctttgtccggcgctcccttggagcctacctagactcagccggctctccacgctttgcctgaccctgcttgctcaactctagttaacggtggagggcagtgtagtctgagcagtactcgttgctgccgcgcgcgccaccagacataatagctgacagactaacagactgttcctttccatgggtcttttctgcagtcaccgtcgtcgacacgtgtgatcagatatcgcggccgctctagagatatcgccaccatggagaagttcatcatcctgagcacagtgctggccgccagctttgcctacgacaagatctgtatcggctaccagaccaacaatagcaccgagaccgtgaatacactgagcgagcagaacgtgcctgtgacacaggtggaagagctggtgcacagaggcatcgatcctatcctgtgtggcacagagctgggatctcctctggtgctggacgattgttctctggagggcctgatcctgggcaaccccaagtgtgacctgtacctgaacggccgcgagtggagctacatcgtggagaggcccaaggaaatggagggcgtgtgttaccctggcagcatcgagaatcaggaggagctgaggagcctgttcagcagcatcaagaaatacgagcgggtgaagatgttcgacttcaccaagtggaacgtgacctacaccggcacaagcaaggcctgtaacaacacc

SEQ ID NO: 19 - DNA, 6114 bp, Artificial Sequence
  Plasmid DNA: 53352
tcgcgcgtttcggtgatgacggtgaaaacctctgacacatgcagctcccggagacggtcacagcttgtctgtaagcggatgccgggagcagacaagcccgtcagggcgcgtcagcgggtgttggcgggtgtcggggctggcttaactatgcggcatcagagcagattgtactgagagtgcaccatatgcggtgtgaaataccgcacagatgcgtaaggagaaaataccgcatcagattggctattggccattgcatacgttgtatccatatcataatatgtacatttatattggctcatgtccaacattaccgccatgttgacattgattattgactagttattaatagtaatcaattacgggaacttccatagcccatatatggagttccgcgttacataacttacgggaatttccaaacctggctgaccgcccaacgacccccgcccattgacgtcaataatgacgtatgttcccatagtaacgccaatagggaacttccattgacgtcaatgggtggagtatttacggtaaactgcccacttgggaatttccaagtgtatcatatgccaagtacgccccctattgacgtcaatgacgggaacttccataagcttgcattatgcccagtacatgaccttatgggaatttcctacttggcagtacatctacgtattagtcatcgctattaccatggtgatgcggttttggcagtacatcaatgggcgtggatagcggtttgactcacgggaacttccaagtctccaccccattgacgtcaatgggagtttgttttgactcaccaaaatcaacgggaattcccaaaatgtcgtaacaactccgccccattgacgcaaatgggcggtaggcgtgtacggtgggaggtctatataagcagagctcgtttagtgaaccgtcagatcgcctggagacgccatccacgctgttttgacctccatagaagacaccgggaccgatccagcctccatcggctcgcatctctccttcacgcgcccgccgccctacctgaggccgccatccacgccggttgagtcgcgttctgccgcctcccgcctgtggtgcctcctgaactgcgtccgccgtctaggtaagtttaaagctcaggtcgagaccgggcctttgtccggcgctcccttggagcctacctagactcagccggctctccacgctttgcctgaccctgcttgctcaactctagttaacggtggagggcagtgtagtctgagcagtactcgttgctgccgcgcgcgccaccagacataatagctgacagactaacagactgttcctttccatgggtcttttctgcagtcaccgtcgtcgacacgtgtgatcagatatcgcggccgctctagagatatcgccaccatggagaagttcatcatcctgagcacagtgctggccgccagctttgcctacgacaagatctgtatcggctaccagaccaacaatagcaccgagaccgtgaatacactgagcgagcagaacgtgcctgtgacacaggtggaagagctggtgcacagaggcatcgatcctatcctgtgtggcacagagctgggatctcctctggtgctggacgattgttctctggagggcctgatcctgggcaaccccaagtgtgacctgtacctgaacggccgcgagtggagctacatcgtggagaggcccaaggaaatggagggcgtgtgttaccctggcagcatcgagaatcaggaggagctgaggagcctgttcagcagcatcaagaaatacgagcgggtgaagatgttcgacttcaccaagtggaacgtgacctacaccggcacaagcaaggcctgtaacaacaccagcaaccagggcagcttctacagatccatgagatggctgaccctgaagagcggacagtttcccgtgcagaccgacgagtacaagaacacccgggacagcgacatcgtgtttacctgggccattcaccaccctcctaccagcgatgagcaggtgaagctgtacaagaaccctgacaccctgagcagcgtgacaaccgtggagatcaaccggagcttcaagcccaatatcggccctagacctctggtgagaggccagcagggcagaatggattactactgggccgtgctgaaacctggccagaccgtgaagatccagaccaacggcaatctgatcgcccctgagtatggccacctgatcacaggcaagagccacggcagaatcctgaagaacaacctgcctatgggccagtgtgtgaccgagtgccagctgaatgagggcgtgatgaacacctccaagcccttccagaataccagcaagcactacatcggcaagtgccccaagtacatccctagcggcagcctgaaactggccatcggcctgagaaatgtgcctcagagggagaccagaggactgtttggagccatcgccggattcatcgaaggaggatggcctggactggtcgccggatggtatggattccagcaccagaatgccgagggaacaggaattgccgccgacagagactctacacagcgggccatcgacaacatgcagaacaagctgaacaacgtgatcgacaagatgaacaagcagttcgaggtggtgaaccacgagtttagcgaggtggagagccggatcaacatgatcaacagcaagatcgacgaccagatcacagacatctgggcctacaatgccgaactgctggtgctgctggagaaccagaaaaccctggacgagcacgacgccaatgtgagaaacctgcacgacagagtgaggagagtgctgagggagaacgccatcgatacaggcgatggctgcttcgagatcctgcacaagtgtgacaacaactgtatggacaccatccggaacggcacctacaaccacaaggagtacgaggaggagtccaagatcgagcggcagaaagtgaatagcggcagactggtgcctagaggatctcctggcagcggatatattcctgaggcccctagagatggacaggcctatgtgagaaaggatggcgaatgggtgctgctgtctacatttctgggacaccaccatcaccaccattgatgaacacgtgggatccagatctgctgtgccttctagttgccagccatctgttgtttgcccctcccccgtgccttccttgaccctggaaggtgccactcccactgtcctttcctaataaaatgaggaaattgcatcgcattgtctgagtaggtgtcattctattctggggggtggggtggggcaggacagcaagggggaggattgggaagacaatagcaggcatgctggggatgcggtgggctctatgggtacccaggtgctgaagaattgacccggttcctcctgggccagaaagaagcaggcacatccccttctctgtgacacaccctgtccacgcccctggttcttagttccagccccactcataggacactcatagctcaggagggctccgccttcaatcccacccgctaaagtacttggagcggtctctccctccctcatcagcccaccaaaccaaacctagcctccaagagtgggaagaaattaaagcaagataggctattaagtgcagagggagagaaaatgcctccaacatgtgaggaagtaatgagagaaatcatagaattttaaggccatgatttaaggccatcatggccttaatcttccgcttcctcgctcactgactcgctgcgctcggtcgttcggctgcggcgagcggtatcagctcactcaaaggcggtaatacggttatccacagaatcaggggataacgcaggaaagaacatgtgagcaaaaggccagcaaaaggccaggaaccgtaaaaaggccgcgttgctggcgtttttccataggctccgcccccctgacgagcatcacaaaaatcgacgctcaagtcagaggtggcgaaacccgacaggactataaagataccaggcgtttccccctggaagctccctcgtgcgctctcctgttccgaccctgccgcttaccggatacctgtccgcctttctcccttcgggaagcgtggcgctttctcatagctcacgctgtaggtatctcagttcggtgtaggtcgttcgctccaagctgggctgtgtgcacgaaccccccgttcagcccgaccgctgcgccttatccggtaactatcgtcttgagtccaacccggtaagacacgacttatcgccactggcagcagccactggtaacaggattagcagagcgaggtatgtaggcggtgctacagagttcttgaagtggtggcctaactacggctacactagaagaacagtatttggtatctgcgctctgctgaagccagttaccttcggaaaaagagttggtagctcttgatccggcaaacaaaccaccgctggtagcggtggtttttttgtttgcaagcagcagattacgcgcagaaaaaaaggatctcaagaagatcctttgatcttttctacggggtctgacgctcagtggaacgaaaactcacgttaagggattttggtcatgagattatcaaaaaggatcttcacctagatccttttaaattaaaaatgaagttttaaatcaatctaaagtatatatgagtaaacttggtctgacagttaccaatgcttaatcagtgaggcacctatctcagcgatctgtctatttcgttcatccatagttgcctgactcggggggggggggcgctgaggtctgcctcgtgaagaaggtgttgctgactcataccaggcctgaatcgccccatcatccagccagaaagtgagggagccacggttgatgagagctttgttgtaggtggaccagttggtgattttgaacttttgctttgccacggaacggtctgcgttgtcgggaagatgcgtgatctgatccttcaactcagcaaaagttcgatttattcaacaaagccgccgtcccgtcaagtcagcgtaatgctctgccagtgttacaaccaattaaccaattctgattagaaaaactcatcgagcatcaaatgaaactgcaatttattcatatcaggattatcaataccatatttttgaaaaagccgtttctgtaatgaaggagaaaactcaccgaggcagttccataggatggcaagatcctggtatcggtctgcgattccgactcgtccaacatcaatacaacctattaatttcccctcgtcaaaaataaggttatcaagtgagaaatcaccatgagtgacgactgaatccggtgagaatggcaaaagcttatgcatttctttccagacttgttcaacaggccagccattacgctcgtcatcaaaatcactcgcatcaaccaaaccgttattcattcgtgattgcgcctgagcgagacgaaatacgcgatcgctgttaaaaggacaattacaaacaggaatcgaatgcaaccggcgcaggaacactgccagcgcatcaacaatattttcacctgaatcaggatattcttctaatacctggaatgctgttttcccggggatcgcagtggtgagtaaccatgcatcatcaggagtacggataaaatgcttgatggtcggaagaggcataaattccgtcagccagtttagtctgaccatctcatctgtaacatcattggcaacgctacctttgccatgtttcagaaacaactctggcgcatcgggcttcccatacaatcgatagattgtcgcacctgattgcccgacattatcgcgagcccatttatacccatataaatcagcatccatgttggaatttaatcgcggcctcgagcaagacgtttcccgttgaatatggctcataacaccccttgtattactgtttatgtaagcagacagttttattgttcatgatgatatatttttatcttgtgcaatgtaacatcagagattttgagacacaacgtggctttccccccccccccattattgaagcatttatcagggttattgtctcatgagcggatacatatttgaatgtatttagaaaaataaacaaataggggttccgcgcacatttccccgaaaagtgccacctgacgtctaagaaaccattattatcatgacattaacctataaaaataggcgtatcacgaggccctttcgtc

SEQ ID NO: 20 - DNA, 6114 bp, Artificial Sequence
  Plasmid DNA: 53353
cggcgagcagatgctgatcatctggggagtgcaccaccctaatgacgagaccgagcagagaaccctgtaccagaatgtgggcacctacgtgtctgtgggcaccagcaccctgaataagagaagcacccccgagattgccacaagacccaaggtgaacggccagggaggaagaatggagttcagctggaccctgctggatatgtgggacaccatcaactttgagagcaccggcaatctgatcgcccctgagtacggcttcaagatcagcaagagaggcagcagcggcatcatgaaaaccgagggcaccctggagaattgtgagaccaagtgccagacacctctgggcgccatcaataccaccctgcccttccacaatgtgcaccctctgaccatcggcgagtgccctaagtatgtgaagagcgagaagctggtgctggccacaggactgagaaacgtgccccagatcgagagcagaggcctgtttggagccatcgccggattcatcgagggaggatggcagggaatggtcgatggctggtacggctaccaccacagcaatgatcagggctctggctatgccgccgataaggagtctacccagaaggcctttgacggcatcaccaacaaggtgaacagcgtgatcgagaagatgaacacccagtttgaggctgtgggcaaggagtttagcaacctggagcggagactggagaacctgaacaagaagatggaggacggcttcctggatgtgtggacctacaatgccgaactgctggtgctgatggagaatgagcggaccctggacttccacgacagcaacgtgaagaacctgtacgacaaagtgaggatgcagctgagggacaacgtgaaggaactgggcaatggctgcttcgagttctaccacaagtgtgacgacgagtgtatgaactccgtgaagaacggcacctacgactaccctaagtacgaggaggagagcaagctgaaccggaacgagatcaagggcgtgaagctgtctagcatgggcgtgtatcagatcctggccatctatgccacagtggccggatctctgagcctggcaattatgatggctggaatcagcttctggatgtgctccaatggcagcctgcagtgccggatctgtatctgatgaacacgtgggatccagatctgctgtgccttctagttgccagccatctgttgtttgcccctcccccgtgccttccttgaccctggaaggtgccactcccactgtcctttcctaataaaatgaggaaattgcatcgcattgtctgagtaggtgtcattctattctggggggtggggtggggcaggacagcaagggggaggattgggaagacaatagcaggcatgctggggatgcggtgggctctatgggtacccaggtgctgaagaattgacccggttcctcctgggccagaaagaagcaggcacatccccttctctgtgacacaccctgtccacgcccctggttcttagttccagccccactcataggacactcatagctcaggagggctccgccttcaatcccacccgctaaagtacttggagcggtctctccctccctcatcagcccaccaaaccaaacctagcctccaagagtgggaagaaattaaagcaagataggctattaagtgcagagggagagaaaatgcctccaacatgtgaggaagtaatgagagaaatcatagaattttaaggccatgatttaaggccatcatggccttaatcttccgcttcctcgctcactgactcgctgcgctcggtcgttcggctgcggcgagcggtatcagctcactcaaaggcggtaatacggttatccacagaatcaggggataacgcaggaaagaacatgtgagcaaaaggccagcaaaaggccaggaaccgtaaaaaggccgcgttgctggcgtttttccataggctccgcccccctgacgagcatcacaaaaatcgacgctcaagtcagaggtggcgaaacccgacaggactataaagataccaggcgtttccccctggaagctccctcgtgcgctctcctgttccgaccctgccgcttaccggatacctgtccgcctttctcccttcgggaagcgtggcgctttctcatagctcacgctgtaggtatctcagttcggtgtaggtcgttcgctccaagctgggctgtgtgcacgaaccccccgttcagcccgaccgctgcgccttatccggtaactatcgtcttgagtccaacccggtaagacacgacttatcgccactggcagcagccactggtaacaggattagcagagcgaggtatgtaggcggtgctacagagttcttgaagtggtggcctaactacggctacactagaagaacagtatttggtatctgcgctctgctgaagccagttaccttcggaaaaagagttggtagctcttgatccggcaaacaaaccaccgctggtagcggtggtttttttgtttgcaagcagcagattacgcgcagaaaaaaaggatctcaagaagatcctttgatcttttctacggggtctgacgctcagtggaacgaaaactcacgttaagggattttggtcatgagattatcaaaaaggatcttcacctagatccttttaaattaaaaatgaagttttaaatcaatctaaagtatatatgagtaaacttggtctgacagttaccaatgcttaatcagtgaggcacctatctcagcgatctgtctatttcgttcatccatagttgcctgactcggggggggggggcgctgaggtctgcctcgtgaagaaggtgttgctgactcataccaggcctgaatcgccccatcatccagccagaaagtgagggagccacggttgatgagagctttgttgtaggtggaccagttggtgattttgaacttttgctttgccacggaacggtctgcgttgtcgggaagatgcgtgatctgatccttcaactcagcaaaagttcgatttattcaacaaagccgccgtcccgtcaagtcagcgtaatgctctgccagtgttacaaccaattaaccaattctgattagaaaaactcatcgagcatcaaatgaaactgcaatttattcatatcaggattatcaataccatatttttgaaaaagccgtttctgtaatgaaggagaaaactcaccgaggcagttccataggatggcaagatcctggtatcggtctgcgattccgactcgtccaacatcaatacaacctattaatttcccctcgtcaaaaataaggttatcaagtgagaaatcaccatgagtgacgactgaatccggtgagaatggcaaaagcttatgcatttctttccagacttgttcaacaggccagccattacgctcgtcatcaaaatcactcgcatcaaccaaaccgttattcattcgtgattgcgcctgagcgagacgaaatacgcgatcgctgttaaaaggacaattacaaacaggaatcgaatgcaaccggcgcaggaacactgccagcgcatcaacaatattttcacctgaatcaggatattcttctaatacctggaatgctgttttcccggggatcgcagtggtgagtaaccatgcatcatcaggagtacggataaaatgcttgatggtcggaagaggcataaattccgtcagccagtttagtctgaccatctcatctgtaacatcattggcaacgctacctttgccatgtttcagaaacaactctggcgcatcgggcttcccatacaatcgatagattgtcgcacctgattgcccgacattatcgcgagcccatttatacccatataaatcagcatccatgttggaatttaatcgcggcctcgagcaagacgtttcccgttgaatatggctcataacaccccttgtattactgtttatgtaagcagacagttttattgttcatgatgatatatttttatcttgtgcaatgtaacatcagagattttgagacacaacgtggctttccccccccccccattattgaagcatttatcagggttattgtctcatgagcggatacatatttgaatgtatttagaaaaataaacaaataggggttccgcgcacatttccccgaaaagtgccacctgacgtctaagaaaccattattatcatgacattaacctataaaaataggcgtatcacgaggccctttcgtctcgcgcgtttcggtgatgacggtgaaaacctctgacacatgcagctcccggagacggtcacagcttgtctgtaagcggatgccgggagcagacaagcccgtcagggcgcgtcagcgggtgttggcgggtgtcggggctggcttaactatgcggcatcagagcagattgtactgagagtgcaccatatgcggtgtgaaataccgcacagatgcgtaaggagaaaataccgcatcagattggctattggccattgcatacgttgtatccatatcataatatgtacatttatattggctcatgtccaacattaccgccatgttgacattgattattgactagttattaatagtaatcaattacgggaacttccatagcccatatatggagttccgcgttacataacttacgggaatttccaaacctggctgaccgcccaacgacccccgcccattgacgtcaataatgacgtatgttcccatagtaacgccaatagggaacttccattgacgtcaatgggtggagtatttacggtaaactgcccacttgggaatttccaagtgtatcatatgccaagtacgccccctattgacgtcaatgacgggaacttccataagcttgcattatgcccagtacatgaccttatgggaatttcctacttggcagtacatctacgtattagtcatcgctattaccatggtgatgcggttttggcagtacatcaatgggcgtggatagcggtttgactcacgggaacttccaagtctccaccccattgacgtcaatgggagtttgttttgactcaccaaaatcaacgggaattcccaaaatgtcgtaacaactccgccccattgacgcaaatgggcggtaggcgtgtacggtgggaggtctatataagcagagctcgtttagtgaaccgtcagatcgcctggagacgccatccacgctgttttgacctccatagaagacaccgggaccgatccagcctccatcggctcgcatctctccttcacgcgcccgccgccctacctgaggccgccatccacgccggttgagtcgcgttctgccgcctcccgcctgtggtgcctcctgaactgcgtccgccgtctaggtaagtttaaagctcaggtcgagaccgggcctttgtccggcgctcccttggagcctacctagactcagccggctctccacgctttgcctgaccctgcttgctcaactctagttaacggtggagggcagtgtagtctgagcagtactcgttgctgccgcgcgcgccaccagacataatagctgacagactaacagactgttcctttccatgggtcttttctgcagtcaccgtcgtcgacacgtgtgatcagatatcgcggccgctctagagatatcgccaccatggccatcatctacctgatcctgctgtttacagctgtgagaggcgaccagatctgtatcggctaccacgccaacaatagcaccgagaaggtggacaccatcctggagagaaacgtgacagtgacccacgccaaggacatcctggaaaagacccacaacggcaagctgtgtaagctgaacggcatccctcctctggaactgggcgattgttctatcgccggatggctgctgggaaaccccgagtgtgataggctgctgtctgtgcctgagtggagctacatcatggagaaggagaaccctagggacggcctgtgttaccctggcagcttcaacgattacgaggagctgaagcacctgctgtctagcgtgaagcacttcgagaaggtgaagatcctgcccaaggacagatggacccagcacacaacaacaggaggaagcagagcctgcgccgtgtctggcaaccccagcttcttccggaatatggtgtggctgaccaagaagggcagcaattaccctgtggcccagggcagctacaataataccag

SEQ ID NO: 21 - DNA, 6108 bp, Artificial Sequence
  Plasmid DNA: 53355
cagaatgtgggcacctacgtgtctgtgggcaccagcaccctgaataagagaagcacccccgagattgccacaagacccaaggtgaacggccagggaggaagaatggagttcagctggaccctgctggatatgtgggacaccatcaactttgagagcaccggcaatctgatcgcccctgagtacggcttcaagatcagcaagagaggcagcagcggcatcatgaaaaccgagggcaccctggagaattgtgagaccaagtgccagacacctctgggcgccatcaataccaccctgcccttccacaatgtgcaccctctgaccatcggcgagtgccctaagtatgtgaagagcgagaagctggtgctggccacaggactgagaaacgtgccccagagagagacaagaggcctgtttggagccatcgccggattcatcgagggaggatggcagggaatggtcgatggctggtacggctaccaccacagcaatgatcagggctctggctatgccgccgataaggagtctacccagaaggcctttgacggcatcaccaacaaggtgaacagcgtgatcgagaagatgaacacccagtttgaggctgtgggcaaggagtttagcaacctggagcggagactggagaacctgaacaagaagatggaggacggcttcctggatgtgtggacctacaatgccgaactgctggtgctgatggagaatgagcggaccctggacttccacgacagcaacgtgaagaacctgtacgacaaagtgaggatgcagctgagggacaacgtgaaggaactgggcaatggctgcttcgagttctaccacaagtgtgacgacgagtgtatgaactccgtgaagaacggcacctacgactaccctaagtacgaggaggagagcaagctgaaccggaacgagatcaagagcggcagactggtgcctagaggatctcctggcagcggatatattcctgaggcccctagagatggacaggcctatgtgagaaaggatggcgaatgggtgctgctgtctacatttctgggacaccaccatcaccaccattgatgaacacgtgggatccagatctgctgtgccttctagttgccagccatctgttgtttgcccctcccccgtgccttccttgaccctggaaggtgccactcccactgtcctttcctaataaaatgaggaaattgcatcgcattgtctgagtaggtgtcattctattctggggggtggggtggggcaggacagcaagggggaggattgggaagacaatagcaggcatgctggggatgcggtgggctctatgggtacccaggtgctgaagaattgacccggttcctcctgggccagaaagaagcaggcacatccccttctctgtgacacaccctgtccacgcccctggttcttagttccagccccactcataggacactcatagctcaggagggctccgccttcaatcccacccgctaaagtacttggagcggtctctccctccctcatcagcccaccaaaccaaacctagcctccaagagtgggaagaaattaaagcaagataggctattaagtgcagagggagagaaaatgcctccaacatgtgaggaagtaatgagagaaatcatagaattttaaggccatgatttaaggccatcatggccttaatcttccgcttcctcgctcactgactcgctgcgctcggtcgttcggctgcggcgagcggtatcagctcactcaaaggcggtaatacggttatccacagaatcaggggataacgcaggaaagaacatgtgagcaaaaggccagcaaaaggccaggaaccgtaaaaaggccgcgttgctggcgtttttccataggctccgcccccctgacgagcatcacaaaaatcgacgctcaagtcagaggtggcgaaacccgacaggactataaagataccaggcgtttccccctggaagctccctcgtgcgctctcctgttccgaccctgccgcttaccggatacctgtccgcctttctcccttcgggaagcgtggcgctttctcatagctcacgctgtaggtatctcagttcggtgtaggtcgttcgctccaagctgggctgtgtgcacgaaccccccgttcagcccgaccgctgcgccttatccggtaactatcgtcttgagtccaacccggtaagacacgacttatcgccactggcagcagccactggtaacaggattagcagagcgaggtatgtaggcggtgctacagagttcttgaagtggtggcctaactacggctacactagaagaacagtatttggtatctgcgctctgctgaagccagttaccttcggaaaaagagttggtagctcttgatccggcaaacaaaccaccgctggtagcggtggtttttttgtttgcaagcagcagattacgcgcagaaaaaaaggatctcaagaagatcctttgatcttttctacggggtctgacgctcagtggaacgaaaactcacgttaagggattttggtcatgagattatcaaaaaggatcttcacctagatccttttaaattaaaaatgaagttttaaatcaatctaaagtatatatgagtaaacttggtctgacagttaccaatgcttaatcagtgaggcacctatctcagcgatctgtctatttcgttcatccatagttgcctgactcggggggggggggcgctgaggtctgcctcgtgaagaaggtgttgctgactcataccaggcctgaatcgccccatcatccagccagaaagtgagggagccacggttgatgagagctttgttgtaggtggaccagttggtgattttgaacttttgctttgccacggaacggtctgcgttgtcgggaagatgcgtgatctgatccttcaactcagcaaaagttcgatttattcaacaaagccgccgtcccgtcaagtcagcgtaatgctctgccagtgttacaaccaattaaccaattctgattagaaaaactcatcgagcatcaaatgaaactgcaatttattcatatcaggattatcaataccatatttttgaaaaagccgtttctgtaatgaaggagaaaactcaccgaggcagttccataggatggcaagatcctggtatcggtctgcgattccgactcgtccaacatcaatacaacctattaatttcccctcgtcaaaaataaggttatcaagtgagaaatcaccatgagtgacgactgaatccggtgagaatggcaaaagcttatgcatttctttccagacttgttcaacaggccagccattacgctcgtcatcaaaatcactcgcatcaaccaaaccgttattcattcgtgattgcgcctgagcgagacgaaatacgcgatcgctgttaaaaggacaattacaaacaggaatcgaatgcaaccggcgcaggaacactgccagcgcatcaacaatattttcacctgaatcaggatattcttctaatacctggaatgctgttttcccggggatcgcagtggtgagtaaccatgcatcatcaggagtacggataaaatgcttgatggtcggaagaggcataaattccgtcagccagtttagtctgaccatctcatctgtaacatcattggcaacgctacctttgccatgtttcagaaacaactctggcgcatcgggcttcccatacaatcgatagattgtcgcacctgattgcccgacattatcgcgagcccatttatacccatataaatcagcatccatgttggaatttaatcgcggcctcgagcaagacgtttcccgttgaatatggctcataacaccccttgtattactgtttatgtaagcagacagttttattgttcatgatgatatatttttatcttgtgcaatgtaacatcagagattttgagacacaacgtggctttccccccccccccattattgaagcatttatcagggttattgtctcatgagcggatacatatttgaatgtatttagaaaaataaacaaataggggttccgcgcacatttccccgaaaagtgccacctgacgtctaagaaaccattattatcatgacattaacctataaaaataggcgtatcacgaggccctttcgtctcgcgcgtttcggtgatgacggtgaaaacctctgacacatgcagctcccggagacggtcacagcttgtctgtaagcggatgccgggagcagacaagcccgtcagggcgcgtcagcgggtgttggcgggtgtcggggctggcttaactatgcggcatcagagcagattgtactgagagtgcaccatatgcggtgtgaaataccgcacagatgcgtaaggagaaaataccgcatcagattggctattggccattgcatacgttgtatccatatcataatatgtacatttatattggctcatgtccaacattaccgccatgttgacattgattattgactagttattaatagtaatcaattacgggaacttccatagcccatatatggagttccgcgttacataacttacgggaatttccaaacctggctgaccgcccaacgacccccgcccattgacgtcaataatgacgtatgttcccatagtaacgccaatagggaacttccattgacgtcaatgggtggagtatttacggtaaactgcccacttgggaatttccaagtgtatcatatgccaagtacgccccctattgacgtcaatgacgggaacttccataagcttgcattatgcccagtacatgaccttatgggaatttcctacttggcagtacatctacgtattagtcatcgctattaccatggtgatgcggttttggcagtacatcaatgggcgtggatagcggtttgactcacgggaacttccaagtctccaccccattgacgtcaatgggagtttgttttgactcaccaaaatcaacgggaattcccaaaatgtcgtaacaactccgccccattgacgcaaatgggcggtaggcgtgtacggtgggaggtctatataagcagagctcgtttagtgaaccgtcagatcgcctggagacgccatccacgctgttttgacctccatagaagacaccgggaccgatccagcctccatcggctcgcatctctccttcacgcgcccgccgccctacctgaggccgccatccacgccggttgagtcgcgttctgccgcctcccgcctgtggtgcctcctgaactgcgtccgccgtctaggtaagtttaaagctcaggtcgagaccgggcctttgtccggcgctcccttggagcctacctagactcagccggctctccacgctttgcctgaccctgcttgctcaactctagttaacggtggagggcagtgtagtctgagcagtactcgttgctgccgcgcgcgccaccagacataatagctgacagactaacagactgttcctttccatgggtcttttctgcagtcaccgtcgtcgacacgtgtgatcagatatcgcggccgctctagagatatcgccaccatggccatcatctacctgatcctgctgtttacagctgtgagaggcgaccagatctgtatcggctaccacgccaacaatagcaccgagaaggtggacaccatcctggagagaaacgtgacagtgacccacgccaaggacatcctggaaaagacccacaacggcaagctgtgtaagctgaacggcatccctcctctggaactgggcgattgttctatcgccggatggctgctgggaaaccccgagtgtgataggctgctgtctgtgcctgagtggagctacatcatggagaaggagaaccctagggacggcctgtgttaccctggcagcttcaacgattacgaggagctgaagcacctgctgtctagcgtgaagcacttcgagaaggtgaagatcctgcccaaggacagatggacccagcacacaacaacaggaggaagcagagcctgcgccgtgtctggcaaccccagcttcttccggaatatggtgtggctgaccaagaagggcagcaattaccctgtggcccagggcagctacaataataccagcggcgagcagatgctgatcatctggggagtgcaccaccctaatgacgagaccgagcagagaaccctgtac

SEQ ID NO: 22 - DNA, 6123 bp, Artificial Sequence
  Plasmid DNA: 53356
tcgcgcgtttcggtgatgacggtgaaaacctctgacacatgcagctcccggagacggtcacagcttgtctgtaagcggatgccgggagcagacaagcccgtcagggcgcgtcagcgggtgttggcgggtgtcggggctggcttaactatgcggcatcagagcagattgtactgagagtgcaccatatgcggtgtgaaataccgcacagatgcgtaaggagaaaataccgcatcagattggctattggccattgcatacgttgtatccatatcataatatgtacatttatattggctcatgtccaacattaccgccatgttgacattgattattgactagttattaatagtaatcaattacgggaacttccatagcccatatatggagttccgcgttacataacttacgggaatttccaaacctggctgaccgcccaacgacccccgcccattgacgtcaataatgacgtatgttcccatagtaacgccaatagggaacttccattgacgtcaatgggtggagtatttacggtaaactgcccacttgggaatttccaagtgtatcatatgccaagtacgccccctattgacgtcaatgacgggaacttccataagcttgcattatgcccagtacatgaccttatgggaatttcctacttggcagtacatctacgtattagtcatcgctattaccatggtgatgcggttttggcagtacatcaatgggcgtggatagcggtttgactcacgggaacttccaagtctccaccccattgacgtcaatgggagtttgttttgactcaccaaaatcaacgggaattcccaaaatgtcgtaacaactccgccccattgacgcaaatgggcggtaggcgtgtacggtgggaggtctatataagcagagctcgtttagtgaaccgtcagatcgcctggagacgccatccacgctgttttgacctccatagaagacaccgggaccgatccagcctccatcggctcgcatctctccttcacgcgcccgccgccctacctgaggccgccatccacgccggttgagtcgcgttctgccgcctcccgcctgtggtgcctcctgaactgcgtccgccgtctaggtaagtttaaagctcaggtcgagaccgggcctttgtccggcgctcccttggagcctacctagactcagccggctctccacgctttgcctgaccctgcttgctcaactctagttaacggtggagggcagtgtagtctgagcagtactcgttgctgccgcgcgcgccaccagacataatagctgacagactaacagactgttcctttccatgggtcttttctgcagtcaccgtcgtcgacacgtgtgatcagatatcgcggccgctctagagatatcgccaccatggagaaaaccctgctgttcgccaccatctttctgtgtgtgaaggccgacgagatctgtatcggctacctgagcaacaacagcaccgacaaggtggacaccatcatcgagaacaacgtgaccgtgacaagctctgtggaactggtggagacagagcacaccggcagcttttgtagcatcaacggcaagcagcctatctctctgggcgattgctctttcgccggatggattctgggcaaccccatgtgtgatgacctgatcggcaagaccagctggagctacatcgtggagaagcccaaccctaccaacggcatctgttaccctggcatcctggagaatgaggaggagctgaggctgaagtttagcggcgtgctggagttcaataagttcgaggccttcaccagcaatggatggggagccgtgaattctggagccggagtgacagccgcctgtaagttcggcagcagcaacagcttcttccggaacatgatctggctgatccaccagagcggcacataccccgtgatcaagcggaccttcaacaacaccaagggcagggatgtgctggtggtgtggggaattcaccaccctgccaccctgaaagaacaccaggacctgtacaaaaaggacagcagctatgtggctgtgggcagcgagacctacaacaggagattcacccccgagatcagcacaagacccaaggtgaacggacaggccggaaggatgaccttctactggaccatcgtgaagcctggcgagagcatcaccttcgagagcaatggagcctttctggcccctagatacgccttcgagatcgtgtctgtgggcaatggcaagctgttccggagcgagctgaatatcgagagctgctccaccaagtgtcagacagaagtgggcggcatcaacaccaacaagagcttccacagcgtgcacagaaacaccatcggcgactgccccaagtacgtgaacgtgaagagcctgaagctggccacaggcctgagaaatgtgcccgccatcgccagcagaggactgtttggagccatcgccggattcatcgaaggaggatggcctggcctgatcaatggctggtacggcttccagcacagaaatgaggagggcacaggcattgccgccgataaggagtctacccagaaggccatcgaccagatcaccagcaaggtgaacaacatcgtggaccggatgaacaccaacttcgagagcgtgcagcacgagtttagcgagatcgaggagcggatcaacagactgagcaagcatgtggacgatagcgtggtggacatctggagctataacgcccagctgctggtgctgctggagaacgaaaagaccctggacctgcacgacagcaatgtgaggaacctgcacgagcgcgtgaggagaatgctgaaggacaacgccaaggatgagggcaatggctgcttcaccttctaccacaagtgtgacaacgagtgtatcgagaaagtgaggaacggcacctacgaccacaaggagttcgagaaggagagcaagatcaaccggcaggagatcgagggagtcaagctggatagcagcggcaacgtgtacaagatcctgagcatctacagctgtatcgccagctctctggtgctggccgccctgatcatgggctttatcctgtgggcctgtagcaatggctcctgccggtgtaccatctgtatctgatgaacacgtgggatccagatctgctgtgccttctagttgccagccatctgttgtttgcccctcccccgtgccttccttgaccctggaaggtgccactcccactgtcctttcctaataaaatgaggaaattgcatcgcattgtctgagtaggtgtcattctattctggggggtggggtggggcaggacagcaagggggaggattgggaagacaatagcaggcatgctggggatgcggtgggctctatgggtacccaggtgctgaagaattgacccggttcctcctgggccagaaagaagcaggcacatccccttctctgtgacacaccctgtccacgcccctggttcttagttccagccccactcataggacactcatagctcaggagggctccgccttcaatcccacccgctaaagtacttggagcggtctctccctccctcatcagcccaccaaaccaaacctagcctccaagagtgggaagaaattaaagcaagataggctattaagtgcagagggagagaaaatgcctccaacatgtgaggaagtaatgagagaaatcatagaattttaaggccatgatttaaggccatcatggccttaatcttccgcttcctcgctcactgactcgctgcgctcggtcgttcggctgcggcgagcggtatcagctcactcaaaggcggtaatacggttatccacagaatcaggggataacgcaggaaagaacatgtgagcaaaaggccagcaaaaggccaggaaccgtaaaaaggccgcgttgctggcgtttttccataggctccgcccccctgacgagcatcacaaaaatcgacgctcaagtcagaggtggcgaaacccgacaggactataaagataccaggcgtttccccctggaagctccctcgtgcgctctcctgttccgaccctgccgcttaccggatacctgtccgcctttctcccttcgggaagcgtggcgctttctcatagctcacgctgtaggtatctcagttcggtgtaggtcgttcgctccaagctgggctgtgtgcacgaaccccccgttcagcccgaccgctgcgccttatccggtaactatcgtcttgagtccaacccggtaagacacgacttatcgccactggcagcagccactggtaacaggattagcagagcgaggtatgtaggcggtgctacagagttcttgaagtggtggcctaactacggctacactagaagaacagtatttggtatctgcgctctgctgaagccagttaccttcggaaaaagagttggtagctcttgatccggcaaacaaaccaccgctggtagcggtggtttttttgtttgcaagcagcagattacgcgcagaaaaaaaggatctcaagaagatcctttgatcttttctacggggtctgacgctcagtggaacgaaaactcacgttaagggattttggtcatgagattatcaaaaaggatcttcacctagatccttttaaattaaaaatgaagttttaaatcaatctaaagtatatatgagtaaacttggtctgacagttaccaatgcttaatcagtgaggcacctatctcagcgatctgtctatttcgttcatccatagttgcctgactcggggggggggggcgctgaggtctgcctcgtgaagaaggtgttgctgactcataccaggcctgaatcgccccatcatccagccagaaagtgagggagccacggttgatgagagctttgttgtaggtggaccagttggtgattttgaacttttgctttgccacggaacggtctgcgttgtcgggaagatgcgtgatctgatccttcaactcagcaaaagttcgatttattcaacaaagccgccgtcccgtcaagtcagcgtaatgctctgccagtgttacaaccaattaaccaattctgattagaaaaactcatcgagcatcaaatgaaactgcaatttattcatatcaggattatcaataccatatttttgaaaaagccgtttctgtaatgaaggagaaaactcaccgaggcagttccataggatggcaagatcctggtatcggtctgcgattccgactcgtccaacatcaatacaacctattaatttcccctcgtcaaaaataaggttatcaagtgagaaatcaccatgagtgacgactgaatccggtgagaatggcaaaagcttatgcatttctttccagacttgttcaacaggccagccattacgctcgtcatcaaaatcactcgcatcaaccaaaccgttattcattcgtgattgcgcctgagcgagacgaaatacgcgatcgctgttaaaaggacaattacaaacaggaatcgaatgcaaccggcgcaggaacactgccagcgcatcaacaatattttcacctgaatcaggatattcttctaatacctggaatgctgttttcccggggatcgcagtggtgagtaaccatgcatcatcaggagtacggataaaatgcttgatggtcggaagaggcataaattccgtcagccagtttagtctgaccatctcatctgtaacatcattggcaacgctacctttgccatgtttcagaaacaactctggcgcatcgggcttcccatacaatcgatagattgtcgcacctgattgcccgacattatcgcgagcccatttatacccatataaatcagcatccatgttggaatttaatcgcggcctcgagcaagacgtttcccgttgaatatggctcataacaccccttgtattactgtttatgtaagcagacagttttattgttcatgatgatatatttttatcttgtgcaatgtaacatcagagattttgagacacaacgtggctttccccccccccccattattgaagcatttatcagggttattgtctcatgagcggatacatatttgaatgtatttagaaaaataaacaaataggggttccgcgcacatttccccgaaaagtgccacctgacgtctaagaaaccattattatcatgacattaacctataaaaataggcgtatcacgaggccctttcgtc

SEQ ID NO: 23 - DNA, 6114 bp, Artificial Sequence
  Plasmid DNA: 53358
cgccttcgagatcgtgtctgtgggcaatggcaagctgttccggagcgagctgaatatcgagagctgctccaccaagtgtcagacagaagtgggcggcatcaacaccaacaagagcttccacagcgtgcacagaaacaccatcggcgactgccccaagtacgtgaacgtgaagagcctgaagctggccacaggcctgagaaatgtgccccagagagagaccagaggactgtttggagccatcgccggattcatcgaaggaggatggcctggcctgatcaatggctggtacggcttccagcacagaaatgaggagggcacaggcattgccgccgataaggagtctacccagaaggccatcgaccagatcaccagcaaggtgaacaacatcgtggaccggatgaacaccaacttcgagagcgtgcagcacgagtttagcgagatcgaggagcggatcaacagactgagcaagcatgtggacgatagcgtggtggacatctggagctataacgcccagctgctggtgctgctggagaacgaaaagaccctggacctgcacgacagcaatgtgaggaacctgcacgagcgcgtgaggagaatgctgaaggacaacgccaaggatgagggcaatggctgcttcaccttctaccacaagtgtgacaacgagtgtatcgagaaagtgaggaacggcacctacgaccacaaggagttcgagaaggagagcaagatcaaccggcaggagatcgagagcggcagactggtgcctagaggatctcctggcagcggatatattcctgaggcccctagagatggacaggcctatgtgagaaaggatggcgaatgggtgctgctgtctacatttctgggacaccaccatcaccaccattgatgaacacgtgggatccagatctgctgtgccttctagttgccagccatctgttgtttgcccctcccccgtgccttccttgaccctggaaggtgccactcccactgtcctttcctaataaaatgaggaaattgcatcgcattgtctgagtaggtgtcattctattctggggggtggggtggggcaggacagcaagggggaggattgggaagacaatagcaggcatgctggggatgcggtgggctctatgggtacccaggtgctgaagaattgacccggttcctcctgggccagaaagaagcaggcacatccccttctctgtgacacaccctgtccacgcccctggttcttagttccagccccactcataggacactcatagctcaggagggctccgccttcaatcccacccgctaaagtacttggagcggtctctccctccctcatcagcccaccaaaccaaacctagcctccaagagtgggaagaaattaaagcaagataggctattaagtgcagagggagagaaaatgcctccaacatgtgaggaagtaatgagagaaatcatagaattttaaggccatgatttaaggccatcatggccttaatcttccgcttcctcgctcactgactcgctgcgctcggtcgttcggctgcggcgagcggtatcagctcactcaaaggcggtaatacggttatccacagaatcaggggataacgcaggaaagaacatgtgagcaaaaggccagcaaaaggccaggaaccgtaaaaaggccgcgttgctggcgtttttccataggctccgcccccctgacgagcatcacaaaaatcgacgctcaagtcagaggtggcgaaacccgacaggactataaagataccaggcgtttccccctggaagctccctcgtgcgctctcctgttccgaccctgccgcttaccggatacctgtccgcctttctcccttcgggaagcgtggcgctttctcatagctcacgctgtaggtatctcagttcggtgtaggtcgttcgctccaagctgggctgtgtgcacgaaccccccgttcagcccgaccgctgcgccttatccggtaactatcgtcttgagtccaacccggtaagacacgacttatcgccactggcagcagccactggtaacaggattagcagagcgaggtatgtaggcggtgctacagagttcttgaagtggtggcctaactacggctacactagaagaacagtatttggtatctgcgctctgctgaagccagttaccttcggaaaaagagttggtagctcttgatccggcaaacaaaccaccgctggtagcggtggtttttttgtttgcaagcagcagattacgcgcagaaaaaaaggatctcaagaagatcctttgatcttttctacggggtctgacgctcagtggaacgaaaactcacgttaagggattttggtcatgagattatcaaaaaggatcttcacctagatccttttaaattaaaaatgaagttttaaatcaatctaaagtatatatgagtaaacttggtctgacagttaccaatgcttaatcagtgaggcacctatctcagcgatctgtctatttcgttcatccatagttgcctgactcggggggggggggcgctgaggtctgcctcgtgaagaaggtgttgctgactcataccaggcctgaatcgccccatcatccagccagaaagtgagggagccacggttgatgagagctttgttgtaggtggaccagttggtgattttgaacttttgctttgccacggaacggtctgcgttgtcgggaagatgcgtgatctgatccttcaactcagcaaaagttcgatttattcaacaaagccgccgtcccgtcaagtcagcgtaatgctctgccagtgttacaaccaattaaccaattctgattagaaaaactcatcgagcatcaaatgaaactgcaatttattcatatcaggattatcaataccatatttttgaaaaagccgtttctgtaatgaaggagaaaactcaccgaggcagttccataggatggcaagatcctggtatcggtctgcgattccgactcgtccaacatcaatacaacctattaatttcccctcgtcaaaaataaggttatcaagtgagaaatcaccatgagtgacgactgaatccggtgagaatggcaaaagcttatgcatttctttccagacttgttcaacaggccagccattacgctcgtcatcaaaatcactcgcatcaaccaaaccgttattcattcgtgattgcgcctgagcgagacgaaatacgcgatcgctgttaaaaggacaattacaaacaggaatcgaatgcaaccggcgcaggaacactgccagcgcatcaacaatattttcacctgaatcaggatattcttctaatacctggaatgctgttttcccggggatcgcagtggtgagtaaccatgcatcatcaggagtacggataaaatgcttgatggtcggaagaggcataaattccgtcagccagtttagtctgaccatctcatctgtaacatcattggcaacgctacctttgccatgtttcagaaacaactctggcgcatcgggcttcccatacaatcgatagattgtcgcacctgattgcccgacattatcgcgagcccatttatacccatataaatcagcatccatgttggaatttaatcgcggcctcgagcaagacgtttcccgttgaatatggctcataacaccccttgtattactgtttatgtaagcagacagttttattgttcatgatgatatatttttatcttgtgcaatgtaacatcagagattttgagacacaacgtggctttccccccccccccattattgaagcatttatcagggttattgtctcatgagcggatacatatttgaatgtatttagaaaaataaacaaataggggttccgcgcacatttccccgaaaagtgccacctgacgtctaagaaaccattattatcatgacattaacctataaaaataggcgtatcacgaggccctttcgtctcgcgcgtttcggtgatgacggtgaaaacctctgacacatgcagctcccggagacggtcacagcttgtctgtaagcggatgccgggagcagacaagcccgtcagggcgcgtcagcgggtgttggcgggtgtcggggctggcttaactatgcggcatcagagcagattgtactgagagtgcaccatatgcggtgtgaaataccgcacagatgcgtaaggagaaaataccgcatcagattggctattggccattgcatacgttgtatccatatcataatatgtacatttatattggctcatgtccaacattaccgccatgttgacattgattattgactagttattaatagtaatcaattacgggaacttccatagcccatatatggagttccgcgttacataacttacgggaatttccaaacctggctgaccgcccaacgacccccgcccattgacgtcaataatgacgtatgttcccatagtaacgccaatagggaacttccattgacgtcaatgggtggagtatttacggtaaactgcccacttgggaatttccaagtgtatcatatgccaagtacgccccctattgacgtcaatgacgggaacttccataagcttgcattatgcccagtacatgaccttatgggaatttcctacttggcagtacatctacgtattagtcatcgctattaccatggtgatgcggttttggcagtacatcaatgggcgtggatagcggtttgactcacgggaacttccaagtctccaccccattgacgtcaatgggagtttgttttgactcaccaaaatcaacgggaattcccaaaatgtcgtaacaactccgccccattgacgcaaatgggcggtaggcgtgtacggtgggaggtctatataagcagagctcgtttagtgaaccgtcagatcgcctggagacgccatccacgctgttttgacctccatagaagacaccgggaccgatccagcctccatcggctcgcatctctccttcacgcgcccgccgccctacctgaggccgccatccacgccggttgagtcgcgttctgccgcctcccgcctgtggtgcctcctgaactgcgtccgccgtctaggtaagtttaaagctcaggtcgagaccgggcctttgtccggcgctcccttggagcctacctagactcagccggctctccacgctttgcctgaccctgcttgctcaactctagttaacggtggagggcagtgtagtctgagcagtactcgttgctgccgcgcgcgccaccagacataatagctgacagactaacagactgttcctttccatgggtcttttctgcagtcaccgtcgtcgacacgtgtgatcagatatcgcggccgctctagagatatcgccaccatggagaaaaccctgctgttcgccaccatctttctgtgtgtgaaggccgacgagatctgtatcggctacctgagcaacaacagcaccgacaaggtggacaccatcatcgagaacaacgtgaccgtgacaagctctgtggaactggtggagacagagcacaccggcagcttttgtagcatcaacggcaagcagcctatctctctgggcgattgctctttcgccggatggattctgggcaaccccatgtgtgatgacctgatcggcaagaccagctggagctacatcgtggagaagcccaaccctaccaacggcatctgttaccctggcatcctggagaatgaggaggagctgaggctgaagtttagcggcgtgctggagttcaataagttcgaggccttcaccagcaatggatggggagccgtgaattctggagccggagtgacagccgcctgtaagttcggcagcagcaacagcttcttccggaacatgatctggctgatccaccagagcggcacataccccgtgatcaagcggaccttcaacaacaccaagggcagggatgtgctggtggtgtggggaattcaccaccctgccaccctgaaagaacaccaggacctgtacaaaaaggacagcagctatgtggctgtgggcagcgagacctacaacaggagattcacccccgagatcagcacaagacccaaggtgaacggacaggccggaaggatgaccttctactggaccatcgtgaagcctggcgagagcatcaccttcgagagcaatggagcctttctggcccctagata

SEQ ID NO: 24 - DNA, 6138 bp, Artificial Sequence
  Plasmid DNA: 53359
atgctgctggaccctggcgataccgtgaccttcaccttcaacggcgcctttatcgcccctgatagggccaccttcctgagaagcaatgcccctagcggcgtggagtataacggcaagagcctgggcattcagagcgatgcccagatcgatgagtcttgtgagggcgagtgcttttactctggcggcaccatcaatagccctctgcccttccagaacatcgatagctgggctgtgggaagatgtcccagatacgtgaagcagagcagcctgcctctggccctgggcatgaagaatgtgcccgagaagatccacaccagaggactgtttggagccatcgccggattcatcgagaatggctgggagggactgatcgatggctggtacggcttcagacaccagaatgcccagggacagggaacagccgccgattacaagtctacacaggccgctattgaccagatcacaggcaagctgaaccggctgatcgagaaaaccaacacccagttcgagctgatcgacaacgagttcaccgaggtggagcagcagatcggcaacgtgatcaactggaccagagacagcctgaccgagatctggagctacaatgccgaactgctggtggccatggagaatcagcacaccatcgacctggccgactccgagatgaataagctgtacgagagagtgaggaggcagctgagagagaatgccgaggaggacggcacaggctgcttcgagatcttccacagatgtgacgaccagtgtatggagagcatcaggaacaacacctacaaccacaccgagtacagacaggaagccctgcagaaccggatcatgatcaaccccgtgaagctgtctggcggctacaaggatgtgatcctgtggttcagctttggcgccagctgtgtgatgctgctggccattgccatgggcctgatcttcatgtgtgtgaagaacggcaacctgaggtgtaccatctgtatctgatgaacacgtgggatccagatctgctgtgccttctagttgccagccatctgttgtttgcccctcccccgtgccttccttgaccctggaaggtgccactcccactgtcctttcctaataaaatgaggaaattgcatcgcattgtctgagtaggtgtcattctattctggggggtggggtggggcaggacagcaagggggaggattgggaagacaatagcaggcatgctggggatgcggtgggctctatgggtacccaggtgctgaagaattgacccggttcctcctgggccagaaagaagcaggcacatccccttctctgtgacacaccctgtccacgcccctggttcttagttccagccccactcataggacactcatagctcaggagggctccgccttcaatcccacccgctaaagtacttggagcggtctctccctccctcatcagcccaccaaaccaaacctagcctccaagagtgggaagaaattaaagcaagataggctattaagtgcagagggagagaaaatgcctccaacatgtgaggaagtaatgagagaaatcatagaattttaaggccatgatttaaggccatcatggccttaatcttccgcttcctcgctcactgactcgctgcgctcggtcgttcggctgcggcgagcggtatcagctcactcaaaggcggtaatacggttatccacagaatcaggggataacgcaggaaagaacatgtgagcaaaaggccagcaaaaggccaggaaccgtaaaaaggccgcgttgctggcgtttttccataggctccgcccccctgacgagcatcacaaaaatcgacgctcaagtcagaggtggcgaaacccgacaggactataaagataccaggcgtttccccctggaagctccctcgtgcgctctcctgttccgaccctgccgcttaccggatacctgtccgcctttctcccttcgggaagcgtggcgctttctcatagctcacgctgtaggtatctcagttcggtgtaggtcgttcgctccaagctgggctgtgtgcacgaaccccccgttcagcccgaccgctgcgccttatccggtaactatcgtcttgagtccaacccggtaagacacgacttatcgccactggcagcagccactggtaacaggattagcagagcgaggtatgtaggcggtgctacagagttcttgaagtggtggcctaactacggctacactagaagaacagtatttggtatctgcgctctgctgaagccagttaccttcggaaaaagagttggtagctcttgatccggcaaacaaaccaccgctggtagcggtggtttttttgtttgcaagcagcagattacgcgcagaaaaaaaggatctcaagaagatcctttgatcttttctacggggtctgacgctcagtggaacgaaaactcacgttaagggattttggtcatgagattatcaaaaaggatcttcacctagatccttttaaattaaaaatgaagttttaaatcaatctaaagtatatatgagtaaacttggtctgacagttaccaatgcttaatcagtgaggcacctatctcagcgatctgtctatttcgttcatccatagttgcctgactcggggggggggggcgctgaggtctgcctcgtgaagaaggtgttgctgactcataccaggcctgaatcgccccatcatccagccagaaagtgagggagccacggttgatgagagctttgttgtaggtggaccagttggtgattttgaacttttgctttgccacggaacggtctgcgttgtcgggaagatgcgtgatctgatccttcaactcagcaaaagttcgatttattcaacaaagccgccgtcccgtcaagtcagcgtaatgctctgccagtgttacaaccaattaaccaattctgattagaaaaactcatcgagcatcaaatgaaactgcaatttattcatatcaggattatcaataccatatttttgaaaaagccgtttctgtaatgaaggagaaaactcaccgaggcagttccataggatggcaagatcctggtatcggtctgcgattccgactcgtccaacatcaatacaacctattaatttcccctcgtcaaaaataaggttatcaagtgagaaatcaccatgagtgacgactgaatccggtgagaatggcaaaagcttatgcatttctttccagacttgttcaacaggccagccattacgctcgtcatcaaaatcactcgcatcaaccaaaccgttattcattcgtgattgcgcctgagcgagacgaaatacgcgatcgctgttaaaaggacaattacaaacaggaatcgaatgcaaccggcgcaggaacactgccagcgcatcaacaatattttcacctgaatcaggatattcttctaatacctggaatgctgttttcccggggatcgcagtggtgagtaaccatgcatcatcaggagtacggataaaatgcttgatggtcggaagaggcataaattccgtcagccagtttagtctgaccatctcatctgtaacatcattggcaacgctacctttgccatgtttcagaaacaactctggcgcatcgggcttcccatacaatcgatagattgtcgcacctgattgcccgacattatcgcgagcccatttatacccatataaatcagcatccatgttggaatttaatcgcggcctcgagcaagacgtttcccgttgaatatggctcataacaccccttgtattactgtttatgtaagcagacagttttattgttcatgatgatatatttttatcttgtgcaatgtaacatcagagattttgagacacaacgtggctttccccccccccccattattgaagcatttatcagggttattgtctcatgagcggatacatatttgaatgtatttagaaaaataaacaaataggggttccgcgcacatttccccgaaaagtgccacctgacgtctaagaaaccattattatcatgacattaacctataaaaataggcgtatcacgaggccctttcgtctcgcgcgtttcggtgatgacggtgaaaacctctgacacatgcagctcccggagacggtcacagcttgtctgtaagcggatgccgggagcagacaagcccgtcagggcgcgtcagcgggtgttggcgggtgtcggggctggcttaactatgcggcatcagagcagattgtactgagagtgcaccatatgcggtgtgaaataccgcacagatgcgtaaggagaaaataccgcatcagattggctattggccattgcatacgttgtatccatatcataatatgtacatttatattggctcatgtccaacattaccgccatgttgacattgattattgactagttattaatagtaatcaattacgggaacttccatagcccatatatggagttccgcgttacataacttacgggaatttccaaacctggctgaccgcccaacgacccccgcccattgacgtcaataatgacgtatgttcccatagtaacgccaatagggaacttccattgacgtcaatgggtggagtatttacggtaaactgcccacttgggaatttccaagtgtatcatatgccaagtacgccccctattgacgtcaatgacgggaacttccataagcttgcattatgcccagtacatgaccttatgggaatttcctacttggcagtacatctacgtattagtcatcgctattaccatggtgatgcggttttggcagtacatcaatgggcgtggatagcggtttgactcacgggaacttccaagtctccaccccattgacgtcaatgggagtttgttttgactcaccaaaatcaacgggaattcccaaaatgtcgtaacaactccgccccattgacgcaaatgggcggtaggcgtgtacggtgggaggtctatataagcagagctcgtttagtgaaccgtcagatcgcctggagacgccatccacgctgttttgacctccatagaagacaccgggaccgatccagcctccatcggctcgcatctctccttcacgcgcccgccgccctacctgaggccgccatccacgccggttgagtcgcgttctgccgcctcccgcctgtggtgcctcctgaactgcgtccgccgtctaggtaagtttaaagctcaggtcgagaccgggcctttgtccggcgctcccttggagcctacctagactcagccggctctccacgctttgcctgaccctgcttgctcaactctagttaacggtggagggcagtgtagtctgagcagtactcgttgctgccgcgcgcgccaccagacataatagctgacagactaacagactgttcctttccatgggtcttttctgcagtcaccgtcgtcgacacgtgtgatcagatatcgcggccgctctagagatatcgccaccatgaacacccagatcatcgtgatcctggtgctgggactgagcatggtgaggagcgacaagatctgtctgggacaccacgccgtggccaatggcaccaaggtgaacaccctgacagagaagggagtggaggtggtgaatgccacagagaccgtggagatcaccggcatcaacaaagtgtgtaccaagggcaagaaagccgtggatctgggcagctgtggcatcctgggcacaatcatcggacccccccagtgtgatagccacctgaagttcaaggccgacctgatcatcgagcggagaaacagcagcgacatctgctaccctggcaagttcaccaatgaggaggccctgagacagatcatcagagagagcggcggcatcgacaaagaacccatgggcttcaggtacagcggcatcaagacagatggagccacctccgcctgtaagagaaccgtgtccagcttctacagcgagatgaagtggctgctgtccagcaaagccaaccaggtgttcccccagctgaaccagacctaccggaacaacagaaaggagcccgccctgattgtctggggagtgcaccacagctctagcctggacgagcagaacaagctgtatggcgccggaaacaagctgatcacagtgggcagcagcaagtaccagcagagcttcagcccttctcctggcgataggcctaaggtgaacggacaggccggaagaatcgacttccactgg

SEQ ID NO: 25 - DNA, 6132 bp, Artificial Sequence
  Plasmid DNA: 53361
tcgcgcgtttcggtgatgacggtgaaaacctctgacacatgcagctcccggagacggtcacagcttgtctgtaagcggatgccgggagcagacaagcccgtcagggcgcgtcagcgggtgttggcgggtgtcggggctggcttaactatgcggcatcagagcagattgtactgagagtgcaccatatgcggtgtgaaataccgcacagatgcgtaaggagaaaataccgcatcagattggctattggccattgcatacgttgtatccatatcataatatgtacatttatattggctcatgtccaacattaccgccatgttgacattgattattgactagttattaatagtaatcaattacgggaacttccatagcccatatatggagttccgcgttacataacttacgggaatttccaaacctggctgaccgcccaacgacccccgcccattgacgtcaataatgacgtatgttcccatagtaacgccaatagggaacttccattgacgtcaatgggtggagtatttacggtaaactgcccacttgggaatttccaagtgtatcatatgccaagtacgccccctattgacgtcaatgacgggaacttccataagcttgcattatgcccagtacatgaccttatgggaatttcctacttggcagtacatctacgtattagtcatcgctattaccatggtgatgcggttttggcagtacatcaatgggcgtggatagcggtttgactcacgggaacttccaagtctccaccccattgacgtcaatgggagtttgttttgactcaccaaaatcaacgggaattcccaaaatgtcgtaacaactccgccccattgacgcaaatgggcggtaggcgtgtacggtgggaggtctatataagcagagctcgtttagtgaaccgtcagatcgcctggagacgccatccacgctgttttgacctccatagaagacaccgggaccgatccagcctccatcggctcgcatctctccttcacgcgcccgccgccctacctgaggccgccatccacgccggttgagtcgcgttctgccgcctcccgcctgtggtgcctcctgaactgcgtccgccgtctaggtaagtttaaagctcaggtcgagaccgggcctttgtccggcgctcccttggagcctacctagactcagccggctctccacgctttgcctgaccctgcttgctcaactctagttaacggtggagggcagtgtagtctgagcagtactcgttgctgccgcgcgcgccaccagacataatagctgacagactaacagactgttcctttccatgggtcttttctgcagtcaccgtcgtcgacacgtgtgatcagatatcgcggccgctctagagatatcgccaccatgaacacccagatcatcgtgatcctggtgctgggactgagcatggtgaggagcgacaagatctgtctgggacaccacgccgtggccaatggcaccaaggtgaacaccctgacagagaagggagtggaggtggtgaatgccacagagaccgtggagatcaccggcatcaacaaagtgtgtaccaagggcaagaaagccgtggatctgggcagctgtggcatcctgggcacaatcatcggacccccccagtgtgatagccacctgaagttcaaggccgacctgatcatcgagcggagaaacagcagcgacatctgctaccctggcaagttcaccaatgaggaggccctgagacagatcatcagagagagcggcggcatcgacaaagaacccatgggcttcaggtacagcggcatcaagacagatggagccacctccgcctgtaagagaaccgtgtccagcttctacagcgagatgaagtggctgctgtccagcaaagccaaccaggtgttcccccagctgaaccagacctaccggaacaacagaaaggagcccgccctgattgtctggggagtgcaccacagctctagcctggacgagcagaacaagctgtatggcgccggaaacaagctgatcacagtgggcagcagcaagtaccagcagagcttcagcccttctcctggcgataggcctaaggtgaacggacaggccggaagaatcgacttccactggatgctgctggaccctggcgataccgtgaccttcaccttcaacggcgcctttatcgcccctgatagggccaccttcctgagaagcaatgcccctagcggcgtggagtataacggcaagagcctgggcattcagagcgatgcccagatcgatgagtcttgtgagggcgagtgcttttactctggcggcaccatcaatagccctctgcccttccagaacatcgatagctgggctgtgggaagatgtcccagatacgtgaagcagagcagcctgcctctggccctgggcatgaagaatgtgccccagagagagaccagaggactgtttggagccatcgccggattcatcgagaatggctgggagggactgatcgatggctggtacggcttcagacaccagaatgcccagggacagggaacagccgccgattacaagtctacacaggccgctattgaccagatcacaggcaagctgaaccggctgatcgagaaaaccaacacccagttcgagctgatcgacaacgagttcaccgaggtggagcagcagatcggcaacgtgatcaactggaccagagacagcctgaccgagatctggagctacaatgccgaactgctggtggccatggagaatcagcacaccatcgacctggccgactccgagatgaataagctgtacgagagagtgaggaggcagctgagagagaatgccgaggaggacggcacaggctgcttcgagatcttccacagatgtgacgaccagtgtatggagagcatcaggaacaacacctacaaccacaccgagtacagacaggaagccctgcagaaccggatcatgatcaacagcggcagactggtgcctagaggatctcctggcagcggatatattcctgaggcccctagagatggacaggcctatgtgagaaaggatggcgaatgggtgctgctgtctacatttctgggacaccaccatcaccaccattgatgaacacgtgggatccagatctgctgtgccttctagttgccagccatctgttgtttgcccctcccccgtgccttccttgaccctggaaggtgccactcccactgtcctttcctaataaaatgaggaaattgcatcgcattgtctgagtaggtgtcattctattctggggggtggggtggggcaggacagcaagggggaggattgggaagacaatagcaggcatgctggggatgcggtgggctctatgggtacccaggtgctgaagaattgacccggttcctcctgggccagaaagaagcaggcacatccccttctctgtgacacaccctgtccacgcccctggttcttagttccagccccactcataggacactcatagctcaggagggctccgccttcaatcccacccgctaaagtacttggagcggtctctccctccctcatcagcccaccaaaccaaacctagcctccaagagtgggaagaaattaaagcaagataggctattaagtgcagagggagagaaaatgcctccaacatgtgaggaagtaatgagagaaatcatagaattttaaggccatgatttaaggccatcatggccttaatcttccgcttcctcgctcactgactcgctgcgctcggtcgttcggctgcggcgagcggtatcagctcactcaaaggcggtaatacggttatccacagaatcaggggataacgcaggaaagaacatgtgagcaaaaggccagcaaaaggccaggaaccgtaaaaaggccgcgttgctggcgtttttccataggctccgcccccctgacgagcatcacaaaaatcgacgctcaagtcagaggtggcgaaacccgacaggactataaagataccaggcgtttccccctggaagctccctcgtgcgctctcctgttccgaccctgccgcttaccggatacctgtccgcctttctcccttcgggaagcgtggcgctttctcatagctcacgctgtaggtatctcagttcggtgtaggtcgttcgctccaagctgggctgtgtgcacgaaccccccgttcagcccgaccgctgcgccttatccggtaactatcgtcttgagtccaacccggtaagacacgacttatcgccactggcagcagccactggtaacaggattagcagagcgaggtatgtaggcggtgctacagagttcttgaagtggtggcctaactacggctacactagaagaacagtatttggtatctgcgctctgctgaagccagttaccttcggaaaaagagttggtagctcttgatccggcaaacaaaccaccgctggtagcggtggtttttttgtttgcaagcagcagattacgcgcagaaaaaaaggatctcaagaagatcctttgatcttttctacggggtctgacgctcagtggaacgaaaactcacgttaagggattttggtcatgagattatcaaaaaggatcttcacctagatccttttaaattaaaaatgaagttttaaatcaatctaaagtatatatgagtaaacttggtctgacagttaccaatgcttaatcagtgaggcacctatctcagcgatctgtctatttcgttcatccatagttgcctgactcggggggggggggcgctgaggtctgcctcgtgaagaaggtgttgctgactcataccaggcctgaatcgccccatcatccagccagaaagtgagggagccacggttgatgagagctttgttgtaggtggaccagttggtgattttgaacttttgctttgccacggaacggtctgcgttgtcgggaagatgcgtgatctgatccttcaactcagcaaaagttcgatttattcaacaaagccgccgtcccgtcaagtcagcgtaatgctctgccagtgttacaaccaattaaccaattctgattagaaaaactcatcgagcatcaaatgaaactgcaatttattcatatcaggattatcaataccatatttttgaaaaagccgtttctgtaatgaaggagaaaactcaccgaggcagttccataggatggcaagatcctggtatcggtctgcgattccgactcgtccaacatcaatacaacctattaatttcccctcgtcaaaaataaggttatcaagtgagaaatcaccatgagtgacgactgaatccggtgagaatggcaaaagcttatgcatttctttccagacttgttcaacaggccagccattacgctcgtcatcaaaatcactcgcatcaaccaaaccgttattcattcgtgattgcgcctgagcgagacgaaatacgcgatcgctgttaaaaggacaattacaaacaggaatcgaatgcaaccggcgcaggaacactgccagcgcatcaacaatattttcacctgaatcaggatattcttctaatacctggaatgctgttttcccggggatcgcagtggtgagtaaccatgcatcatcaggagtacggataaaatgcttgatggtcggaagaggcataaattccgtcagccagtttagtctgaccatctcatctgtaacatcattggcaacgctacctttgccatgtttcagaaacaactctggcgcatcgggcttcccatacaatcgatagattgtcgcacctgattgcccgacattatcgcgagcccatttatacccatataaatcagcatccatgttggaatttaatcgcggcctcgagcaagacgtttcccgttgaatatggctcataacaccccttgtattactgtttatgtaagcagacagttttattgttcatgatgatatatttttatcttgtgcaatgtaacatcagagattttgagacacaacgtggctttccccccccccccattattgaagcatttatcagggttattgtctcatgagcggatacatatttgaatgtatttagaaaaataaacaaataggggttccgcgcacatttccccgaaaagtgccacctgacgtctaagaaaccattattatcatgacattaacctataaaaataggcgtatcacgaggccctttcgtc

SEQ ID NO: 26 - DNA, 6111 bp, Artificial Sequence
  Plasmid DNA: 53362
tcgcgcgtttcggtgatgacggtgaaaacctctgacacatgcagctcccggagacggtcacagcttgtctgtaagcggatgccgggagcagacaagcccgtcagggcgcgtcagcgggtgttggcgggtgtcggggctggcttaactatgcggcatcagagcagattgtactgagagtgcaccatatgcggtgtgaaataccgcacagatgcgtaaggagaaaataccgcatcagattggctattggccattgcatacgttgtatccatatcataatatgtacatttatattggctcatgtccaacattaccgccatgttgacattgattattgactagttattaatagtaatcaattacgggaacttccatagcccatatatggagttccgcgttacataacttacgggaatttccaaacctggctgaccgcccaacgacccccgcccattgacgtcaataatgacgtatgttcccatagtaacgccaatagggaacttccattgacgtcaatgggtggagtatttacggtaaactgcccacttgggaatttccaagtgtatcatatgccaagtacgccccctattgacgtcaatgacgggaacttccataagcttgcattatgcccagtacatgaccttatgggaatttcctacttggcagtacatctacgtattagtcatcgctattaccatggtgatgcggttttggcagtacatcaatgggcgtggatagcggtttgactcacgggaacttccaagtctccaccccattgacgtcaatgggagtttgttttgactcaccaaaatcaacgggaattcccaaaatgtcgtaacaactccgccccattgacgcaaatgggcggtaggcgtgtacggtgggaggtctatataagcagagctcgtttagtgaaccgtcagatcgcctggagacgccatccacgctgttttgacctccatagaagacaccgggaccgatccagcctccatcggctcgcatctctccttcacgcgcccgccgccctacctgaggccgccatccacgccggttgagtcgcgttctgccgcctcccgcctgtggtgcctcctgaactgcgtccgccgtctaggtaagtttaaagctcaggtcgagaccgggcctttgtccggcgctcccttggagcctacctagactcagccggctctccacgctttgcctgaccctgcttgctcaactctagttaacggtggagggcagtgtagtctgagcagtactcgttgctgccgcgcgcgccaccagacataatagctgacagactaacagactgttcctttccatgggtcttttctgcagtcaccgtcgtcgacacgtgtgatcagatatcgcggccgctctagagatatcgccaccatgtacaaggtggtggtgatcattgccctgctgggagctgtgagaggcctggataagatctgtctgggacaccacgccgtggccaatggcaccatcgtgaaaaccctgaccaacgtgcaggaggaggtcacaaacgccaccgagaccgtggagagcaccagcctgaaccggctgtgtatgaagggccggagctacaaggatctgggcaactgtcaccctatcggcatgctgattggcacacccgcctgtgatctgcacctgaccggcacatgggataccctgatcgagcggaagaatgccatcgcctactgttaccctggcaccaccatcaatgagggagccctgaggcagaaaatcatggagagcggcggcatcagcaagacaagcaccggctttgcctatggcagcagcatcaatagcgccggaaccaccaaggcctgtatgagaaacggcggcgacagcttttatgccgaggtgaagtggctggtgtccaaggacaagggccagaactttccccagaccaccaacacctacaggaacaccgatacagccgagcacctgatcatctggggcatccaccacccatctagcacccaggagaagaacgatctgtacggcacacagagcctgtctatctctgtgggcagcagcacctaccagaacaacttcgtgcctgtggtgagagccagacctcaggtgaacggccagagcggcagaatcgatttccactggaccctggtgcagcctggcgacaatatcaccttcagccacaacggaggaagaatcgcccctagcagagtgtctaaactggtgggcagaggcctgggaattcagagcgaggccagcatcgataatggctgtgagagcaagtgcttttggagaggcggctccatcaataccaagctgcccttccagaacctgagccctagaacagtgggccagtgccccaagtacgtgaacaagaaaagcctgatgctggccaccggcatgagaaatgtgcccgagatcatgcagggcagaggactgtttggagccatcgccggattcatcgagaatggatgggagggcatggtggatggctggtacggcttcagacaccagaatgcccagggaacaggacaggccgccgattacaagtctacacaggccgccatcgatcagatcaccggcaagctgaacaggctgatcgagaaaaccaacaccgagttcgagagcatcgagagcgagttcagcgagatcgagcaccagatcggcaacgtgatcaactggaccaaggacagcatcaccgacatctggacctatcaggccgaactgctggtggccatggagaatcagcacaccatcgacatggccgatagcgagatgctgaacctgtacgagagagtgaggaagcagctgagacagaacgccgaggaggatggcaagggctgcttcgagatctaccacacctgtgacgacagctgtatggagagcatccggaacaacacctacgaccacagccagtatagagaggaggccctgctgaacagactgaacatcaacagcgtgaagctgtccagcggctacaaggacatcatcctgtggttcagctttggcgccagctgttttgtgctgctggccgccgtgatgggactggtgttcttctgcctgaagaacggcaacatgcagtgcaccatctgtatctgatgaacacgtgggatccagatctgctgtgccttctagttgccagccatctgttgtttgcccctcccccgtgccttccttgaccctggaaggtgccactcccactgtcctttcctaataaaatgaggaaattgcatcgcattgtctgagtaggtgtcattctattctggggggtggggtggggcaggacagcaagggggaggattgggaagacaatagcaggcatgctggggatgcggtgggctctatgggtacccaggtgctgaagaattgacccggttcctcctgggccagaaagaagcaggcacatccccttctctgtgacacaccctgtccacgcccctggttcttagttccagccccactcataggacactcatagctcaggagggctccgccttcaatcccacccgctaaagtacttggagcggtctctccctccctcatcagcccaccaaaccaaacctagcctccaagagtgggaagaaattaaagcaagataggctattaagtgcagagggagagaaaatgcctccaacatgtgaggaagtaatgagagaaatcatagaattttaaggccatgatttaaggccatcatggccttaatcttccgcttcctcgctcactgactcgctgcgctcggtcgttcggctgcggcgagcggtatcagctcactcaaaggcggtaatacggttatccacagaatcaggggataacgcaggaaagaacatgtgagcaaaaggccagcaaaaggccaggaaccgtaaaaaggccgcgttgctggcgtttttccataggctccgcccccctgacgagcatcacaaaaatcgacgctcaagtcagaggtggcgaaacccgacaggactataaagataccaggcgtttccccctggaagctccctcgtgcgctctcctgttccgaccctgccgcttaccggatacctgtccgcctttctcccttcgggaagcgtggcgctttctcatagctcacgctgtaggtatctcagttcggtgtaggtcgttcgctccaagctgggctgtgtgcacgaaccccccgttcagcccgaccgctgcgccttatccggtaactatcgtcttgagtccaacccggtaagacacgacttatcgccactggcagcagccactggtaacaggattagcagagcgaggtatgtaggcggtgctacagagttcttgaagtggtggcctaactacggctacactagaagaacagtatttggtatctgcgctctgctgaagccagttaccttcggaaaaagagttggtagctcttgatccggcaaacaaaccaccgctggtagcggtggtttttttgtttgcaagcagcagattacgcgcagaaaaaaaggatctcaagaagatcctttgatcttttctacggggtctgacgctcagtggaacgaaaactcacgttaagggattttggtcatgagattatcaaaaaggatcttcacctagatccttttaaattaaaaatgaagttttaaatcaatctaaagtatatatgagtaaacttggtctgacagttaccaatgcttaatcagtgaggcacctatctcagcgatctgtctatttcgttcatccatagttgcctgactcggggggggggggcgctgaggtctgcctcgtgaagaaggtgttgctgactcataccaggcctgaatcgccccatcatccagccagaaagtgagggagccacggttgatgagagctttgttgtaggtggaccagttggtgattttgaacttttgctttgccacggaacggtctgcgttgtcgggaagatgcgtgatctgatccttcaactcagcaaaagttcgatttattcaacaaagccgccgtcccgtcaagtcagcgtaatgctctgccagtgttacaaccaattaaccaattctgattagaaaaactcatcgagcatcaaatgaaactgcaatttattcatatcaggattatcaataccatatttttgaaaaagccgtttctgtaatgaaggagaaaactcaccgaggcagttccataggatggcaagatcctggtatcggtctgcgattccgactcgtccaacatcaatacaacctattaatttcccctcgtcaaaaataaggttatcaagtgagaaatcaccatgagtgacgactgaatccggtgagaatggcaaaagcttatgcatttctttccagacttgttcaacaggccagccattacgctcgtcatcaaaatcactcgcatcaaccaaaccgttattcattcgtgattgcgcctgagcgagacgaaatacgcgatcgctgttaaaaggacaattacaaacaggaatcgaatgcaaccggcgcaggaacactgccagcgcatcaacaatattttcacctgaatcaggatattcttctaatacctggaatgctgttttcccggggatcgcagtggtgagtaaccatgcatcatcaggagtacggataaaatgcttgatggtcggaagaggcataaattccgtcagccagtttagtctgaccatctcatctgtaacatcattggcaacgctacctttgccatgtttcagaaacaactctggcgcatcgggcttcccatacaatcgatagattgtcgcacctgattgcccgacattatcgcgagcccatttatacccatataaatcagcatccatgttggaatttaatcgcggcctcgagcaagacgtttcccgttgaatatggctcataacaccccttgtattactgtttatgtaagcagacagttttattgttcatgatgatatatttttatcttgtgcaatgtaacatcagagattttgagacacaacgtggctttccccccccccccattattgaagcatttatcagggttattgtctcatgagcggatacatatttgaatgtatttagaaaaataaacaaataggggttccgcgcacatttccccgaaaagtgccacctgacgtctaagaaaccattattatcatgacattaacctataaaaataggcgtatcacgaggccctttcgtc

SEQ ID NO: 27 - DNA, 6105 bp, Artificial Sequence
  Plasmid DNA: 53364
tcgcgcgtttcggtgatgacggtgaaaacctctgacacatgcagctcccggagacggtcacagcttgtctgtaagcggatgccgggagcagacaagcccgtcagggcgcgtcagcgggtgttggcgggtgtcggggctggcttaactatgcggcatcagagcagattgtactgagagtgcaccatatgcggtgtgaaataccgcacagatgcgtaaggagaaaataccgcatcagattggctattggccattgcatacgttgtatccatatcataatatgtacatttatattggctcatgtccaacattaccgccatgttgacattgattattgactagttattaatagtaatcaattacgggaacttccatagcccatatatggagttccgcgttacataacttacgggaatttccaaacctggctgaccgcccaacgacccccgcccattgacgtcaataatgacgtatgttcccatagtaacgccaatagggaacttccattgacgtcaatgggtggagtatttacggtaaactgcccacttgggaatttccaagtgtatcatatgccaagtacgccccctattgacgtcaatgacgggaacttccataagcttgcattatgcccagtacatgaccttatgggaatttcctacttggcagtacatctacgtattagtcatcgctattaccatggtgatgcggttttggcagtacatcaatgggcgtggatagcggtttgactcacgggaacttccaagtctccaccccattgacgtcaatgggagtttgttttgactcaccaaaatcaacgggaattcccaaaatgtcgtaacaactccgccccattgacgcaaatgggcggtaggcgtgtacggtgggaggtctatataagcagagctcgtttagtgaaccgtcagatcgcctggagacgccatccacgctgttttgacctccatagaagacaccgggaccgatccagcctccatcggctcgcatctctccttcacgcgcccgccgccctacctgaggccgccatccacgccggttgagtcgcgttctgccgcctcccgcctgtggtgcctcctgaactgcgtccgccgtctaggtaagtttaaagctcaggtcgagaccgggcctttgtccggcgctcccttggagcctacctagactcagccggctctccacgctttgcctgaccctgcttgctcaactctagttaacggtggagggcagtgtagtctgagcagtactcgttgctgccgcgcgcgccaccagacataatagctgacagactaacagactgttcctttccatgggtcttttctgcagtcaccgtcgtcgacacgtgtgatcagatatcgcggccgctctagagatatcgccaccatgtacaaggtggtggtgatcattgccctgctgggagctgtgagaggcctggataagatctgtctgggacaccacgccgtggccaatggcaccatcgtgaaaaccctgaccaacgtgcaggaggaggtcacaaacgccaccgagaccgtggagagcaccagcctgaaccggctgtgtatgaagggccggagctacaaggatctgggcaactgtcaccctatcggcatgctgattggcacacccgcctgtgatctgcacctgaccggcacatgggataccctgatcgagcggaagaatgccatcgcctactgttaccctggcaccaccatcaatgagggagccctgaggcagaaaatcatggagagcggcggcatcagcaagacaagcaccggctttgcctatggcagcagcatcaatagcgccggaaccaccaaggcctgtatgagaaacggcggcgacagcttttatgccgaggtgaagtggctggtgtccaaggacaagggccagaactttccccagaccaccaacacctacaggaacaccgatacagccgagcacctgatcatctggggcatccaccacccatctagcacccaggagaagaacgatctgtacggcacacagagcctgtctatctctgtgggcagcagcacctaccagaacaacttcgtgcctgtggtgagagccagacctcaggtgaacggccagagcggcagaatcgatttccactggaccctggtgcagcctggcgacaatatcaccttcagccacaacggaggaagaatcgcccctagcagagtgtctaaactggtgggcagaggcctgggaattcagagcgaggccagcatcgataatggctgtgagagcaagtgcttttggagaggcggctccatcaataccaagctgcccttccagaacctgagccctagaacagtgggccagtgccccaagtacgtgaacaagaaaagcctgatgctggccaccggcatgagaaatgtgccccagagagagaccagaggactgtttggagccatcgccggattcatcgagaatggatgggagggcatggtggatggctggtacggcttcagacaccagaatgcccagggaacaggacaggccgccgattacaagtctacacaggccgccatcgatcagatcaccggcaagctgaacaggctgatcgagaaaaccaacaccgagttcgagagcatcgagagcgagttcagcgagatcgagcaccagatcggcaacgtgatcaactggaccaaggacagcatcaccgacatctggacctatcaggccgaactgctggtggccatggagaatcagcacaccatcgacatggccgatagcgagatgctgaacctgtacgagagagtgaggaagcagctgagacagaacgccgaggaggatggcaagggctgcttcgagatctaccacacctgtgacgacagctgtatggagagcatccggaacaacacctacgaccacagccagtatagagaggaggccctgctgaacagactgaacatcaacagcggcagactggtgcctagaggatctcctggcagcggatatattcctgaggcccctagagatggacaggcctatgtgagaaaggatggcgaatgggtgctgctgtctacatttctgggacaccaccatcaccaccattgatgaacacgtgggatccagatctgctgtgccttctagttgccagccatctgttgtttgcccctcccccgtgccttccttgaccctggaaggtgccactcccactgtcctttcctaataaaatgaggaaattgcatcgcattgtctgagtaggtgtcattctattctggggggtggggtggggcaggacagcaagggggaggattgggaagacaatagcaggcatgctggggatgcggtgggctctatgggtacccaggtgctgaagaattgacccggttcctcctgggccagaaagaagcaggcacatccccttctctgtgacacaccctgtccacgcccctggttcttagttccagccccactcataggacactcatagctcaggagggctccgccttcaatcccacccgctaaagtacttggagcggtctctccctccctcatcagcccaccaaaccaaacctagcctccaagagtgggaagaaattaaagcaagataggctattaagtgcagagggagagaaaatgcctccaacatgtgaggaagtaatgagagaaatcatagaattttaaggccatgatttaaggccatcatggccttaatcttccgcttcctcgctcactgactcgctgcgctcggtcgttcggctgcggcgagcggtatcagctcactcaaaggcggtaatacggttatccacagaatcaggggataacgcaggaaagaacatgtgagcaaaaggccagcaaaaggccaggaaccgtaaaaaggccgcgttgctggcgtttttccataggctccgcccccctgacgagcatcacaaaaatcgacgctcaagtcagaggtggcgaaacccgacaggactataaagataccaggcgtttccccctggaagctccctcgtgcgctctcctgttccgaccctgccgcttaccggatacctgtccgcctttctcccttcgggaagcgtggcgctttctcatagctcacgctgtaggtatctcagttcggtgtaggtcgttcgctccaagctgggctgtgtgcacgaaccccccgttcagcccgaccgctgcgccttatccggtaactatcgtcttgagtccaacccggtaagacacgacttatcgccactggcagcagccactggtaacaggattagcagagcgaggtatgtaggcggtgctacagagttcttgaagtggtggcctaactacggctacactagaagaacagtatttggtatctgcgctctgctgaagccagttaccttcggaaaaagagttggtagctcttgatccggcaaacaaaccaccgctggtagcggtggtttttttgtttgcaagcagcagattacgcgcagaaaaaaaggatctcaagaagatcctttgatcttttctacggggtctgacgctcagtggaacgaaaactcacgttaagggattttggtcatgagattatcaaaaaggatcttcacctagatccttttaaattaaaaatgaagttttaaatcaatctaaagtatatatgagtaaacttggtctgacagttaccaatgcttaatcagtgaggcacctatctcagcgatctgtctatttcgttcatccatagttgcctgactcggggggggggggcgctgaggtctgcctcgtgaagaaggtgttgctgactcataccaggcctgaatcgccccatcatccagccagaaagtgagggagccacggttgatgagagctttgttgtaggtggaccagttggtgattttgaacttttgctttgccacggaacggtctgcgttgtcgggaagatgcgtgatctgatccttcaactcagcaaaagttcgatttattcaacaaagccgccgtcccgtcaagtcagcgtaatgctctgccagtgttacaaccaattaaccaattctgattagaaaaactcatcgagcatcaaatgaaactgcaatttattcatatcaggattatcaataccatatttttgaaaaagccgtttctgtaatgaaggagaaaactcaccgaggcagttccataggatggcaagatcctggtatcggtctgcgattccgactcgtccaacatcaatacaacctattaatttcccctcgtcaaaaataaggttatcaagtgagaaatcaccatgagtgacgactgaatccggtgagaatggcaaaagcttatgcatttctttccagacttgttcaacaggccagccattacgctcgtcatcaaaatcactcgcatcaaccaaaccgttattcattcgtgattgcgcctgagcgagacgaaatacgcgatcgctgttaaaaggacaattacaaacaggaatcgaatgcaaccggcgcaggaacactgccagcgcatcaacaatattttcacctgaatcaggatattcttctaatacctggaatgctgttttcccggggatcgcagtggtgagtaaccatgcatcatcaggagtacggataaaatgcttgatggtcggaagaggcataaattccgtcagccagtttagtctgaccatctcatctgtaacatcattggcaacgctacctttgccatgtttcagaaacaactctggcgcatcgggcttcccatacaatcgatagattgtcgcacctgattgcccgacattatcgcgagcccatttatacccatataaatcagcatccatgttggaatttaatcgcggcctcgagcaagacgtttcccgttgaatatggctcataacaccccttgtattactgtttatgtaagcagacagttttattgttcatgatgatatatttttatcttgtgcaatgtaacatcagagattttgagacacaacgtggctttccccccccccccattattgaagcatttatcagggttattgtctcatgagcggatacatatttgaatgtatttagaaaaataaacaaataggggttccgcgcacatttccccgaaaagtgccacctgacgtctaagaaaccattattatcatgacattaacctataaaaataggcgtatcacgaggccctttcgtc

SEQ ID NO: 28 - DNA, 6132 bp, Artificial Sequence
  Plasmid DNA: 53365
tcgcgcgtttcggtgatgacggtgaaaacctctgacacatgcagctcccggagacggtcacagcttgtctgtaagcggatgccgggagcagacaagcccgtcagggcgcgtcagcgggtgttggcgggtgtcggggctggcttaactatgcggcatcagagcagattgtactgagagtgcaccatatgcggtgtgaaataccgcacagatgcgtaaggagaaaataccgcatcagattggctattggccattgcatacgttgtatccatatcataatatgtacatttatattggctcatgtccaacattaccgccatgttgacattgattattgactagttattaatagtaatcaattacgggaacttccatagcccatatatggagttccgcgttacataacttacgggaatttccaaacctggctgaccgcccaacgacccccgcccattgacgtcaataatgacgtatgttcccatagtaacgccaatagggaacttccattgacgtcaatgggtggagtatttacggtaaactgcccacttgggaatttccaagtgtatcatatgccaagtacgccccctattgacgtcaatgacgggaacttccataagcttgcattatgcccagtacatgaccttatgggaatttcctacttggcagtacatctacgtattagtcatcgctattaccatggtgatgcggttttggcagtacatcaatgggcgtggatagcggtttgactcacgggaacttccaagtctccaccccattgacgtcaatgggagtttgttttgactcaccaaaatcaacgggaattcccaaaatgtcgtaacaactccgccccattgacgcaaatgggcggtaggcgtgtacggtgggaggtctatataagcagagctcgtttagtgaaccgtcagatcgcctggagacgccatccacgctgttttgacctccatagaagacaccgggaccgatccagcctccatcggctcgcatctctccttcacgcgcccgccgccctacctgaggccgccatccacgccggttgagtcgcgttctgccgcctcccgcctgtggtgcctcctgaactgcgtccgccgtctaggtaagtttaaagctcaggtcgagaccgggcctttgtccggcgctcccttggagcctacctagactcagccggctctccacgctttgcctgaccctgcttgctcaactctagttaacggtggagggcagtgtagtctgagcagtactcgttgctgccgcgcgcgccaccagacataatagctgacagactaacagactgttcctttccatgggtcttttctgcagtcaccgtcgtcgacacgtgtgatcagatatcgcggccgctctagagatatcgccaccatgatcgccctgattctggtggccctggccctgtctcacacagcctacagccagatcaccaatggcaccaccggcaaccctatcatctgtctgggacaccacgccgtggagaatggcaccagcgtgaaaaccctgaccgacaaccatgtggaagtggtgtctgccaaggaactggtggagaccaaccacaccgatgagctgtgtcctagccctctgaaactggtggatggccaggattgccacctgatcaatggcgccctgggatctcctggatgtgacaggctgcaggacaccacctgggatgtgttcatcgagagacccaccgccgtggatacctgctaccccttcgacgtgcctgattaccagagcctgaggagcattctggccagctctggcagcctggagtttatcgccgagcagttcacctggaatggcgtgaaagtggatggcagcagctctgcctgtctgagaggcggcaggaacagcttcttcagcaggctgaactggctgaccaaggccaccaacggcaattacggccccatcaacgtgaccaaggagaacacaggcagctatgtgagactgtatctgtggggagtgcaccaccctagcagcgataacgagcagaccgacctgtataaggtggccaccggcagagtgacagtgagcaccaggagcgaccagatcagcatcgtgcccaacatcggcagcagacccagagtgagaaaccagagcggcaggatcagcatctactggaccctggtgaatcctggcgacagcatcatcttcaacagcatcggcaacctgattgctcctaggggacactacaagatcagcaagagcaccaagtccaccgtgctgaagagcgacaagagaatcggcagctgtaccagcccttgcctgacagataagggcagcatccagtccgataagcccttccagaacgtgtccagaatcgccatcggcaactgccctaagtatgtgaagcagggctctctgatgctggccacaggcatgagaaacatccccggcaagcaggccaagggactgtttggagccatcgccggattcatcgagaatggctggcagggactgatcgatggctggtacggcttcagacaccagaatgccgagggaacaggaacagccgccgatctgaagtctacacaggccgctattgaccagatcaacggcaagctgaaccggctgatcgagaaaaccaacgagaagtaccaccagatcgagaaggaattcgagcaggtggagggcagaatccaggacctggagaagtacgtggaggacaccaagatcgacctgtggagctacaatgccgaactgctggtggccctggagaatcagcacaccatcgacgtgaccgacagcgagatgaacaagctgttcgagagagtgaggaggcagctgagagagaacgccgaggatcagggcaatggctgcttcgagatcttccaccagtgtgacaacaactgtatcgagagcatccggaacggcacctacgaccacaacatctacagggacgaggccatcaacaaccggatcaagatcaaccctgtgaccctgaccatgggctacaaggacatcatcctgtggatcagcttcagcatgagctgcttcgtgttcgtggccctgatcctgggatttgtgctgtgggcctgccagaacggcaatatccggtgccagatctgtatctgatgaacacgtgggatccagatctgctgtgccttctagttgccagccatctgttgtttgcccctcccccgtgccttccttgaccctggaaggtgccactcccactgtcctttcctaataaaatgaggaaattgcatcgcattgtctgagtaggtgtcattctattctggggggtggggtggggcaggacagcaagggggaggattgggaagacaatagcaggcatgctggggatgcggtgggctctatgggtacccaggtgctgaagaattgacccggttcctcctgggccagaaagaagcaggcacatccccttctctgtgacacaccctgtccacgcccctggttcttagttccagccccactcataggacactcatagctcaggagggctccgccttcaatcccacccgctaaagtacttggagcggtctctccctccctcatcagcccaccaaaccaaacctagcctccaagagtgggaagaaattaaagcaagataggctattaagtgcagagggagagaaaatgcctccaacatgtgaggaagtaatgagagaaatcatagaattttaaggccatgatttaaggccatcatggccttaatcttccgcttcctcgctcactgactcgctgcgctcggtcgttcggctgcggcgagcggtatcagctcactcaaaggcggtaatacggttatccacagaatcaggggataacgcaggaaagaacatgtgagcaaaaggccagcaaaaggccaggaaccgtaaaaaggccgcgttgctggcgtttttccataggctccgcccccctgacgagcatcacaaaaatcgacgctcaagtcagaggtggcgaaacccgacaggactataaagataccaggcgtttccccctggaagctccctcgtgcgctctcctgttccgaccctgccgcttaccggatacctgtccgcctttctcccttcgggaagcgtggcgctttctcatagctcacgctgtaggtatctcagttcggtgtaggtcgttcgctccaagctgggctgtgtgcacgaaccccccgttcagcccgaccgctgcgccttatccggtaactatcgtcttgagtccaacccggtaagacacgacttatcgccactggcagcagccactggtaacaggattagcagagcgaggtatgtaggcggtgctacagagttcttgaagtggtggcctaactacggctacactagaagaacagtatttggtatctgcgctctgctgaagccagttaccttcggaaaaagagttggtagctcttgatccggcaaacaaaccaccgctggtagcggtggtttttttgtttgcaagcagcagattacgcgcagaaaaaaaggatctcaagaagatcctttgatcttttctacggggtctgacgctcagtggaacgaaaactcacgttaagggattttggtcatgagattatcaaaaaggatcttcacctagatccttttaaattaaaaatgaagttttaaatcaatctaaagtatatatgagtaaacttggtctgacagttaccaatgcttaatcagtgaggcacctatctcagcgatctgtctatttcgttcatccatagttgcctgactcggggggggggggcgctgaggtctgcctcgtgaagaaggtgttgctgactcataccaggcctgaatcgccccatcatccagccagaaagtgagggagccacggttgatgagagctttgttgtaggtggaccagttggtgattttgaacttttgctttgccacggaacggtctgcgttgtcgggaagatgcgtgatctgatccttcaactcagcaaaagttcgatttattcaacaaagccgccgtcccgtcaagtcagcgtaatgctctgccagtgttacaaccaattaaccaattctgattagaaaaactcatcgagcatcaaatgaaactgcaatttattcatatcaggattatcaataccatatttttgaaaaagccgtttctgtaatgaaggagaaaactcaccgaggcagttccataggatggcaagatcctggtatcggtctgcgattccgactcgtccaacatcaatacaacctattaatttcccctcgtcaaaaataaggttatcaagtgagaaatcaccatgagtgacgactgaatccggtgagaatggcaaaagcttatgcatttctttccagacttgttcaacaggccagccattacgctcgtcatcaaaatcactcgcatcaaccaaaccgttattcattcgtgattgcgcctgagcgagacgaaatacgcgatcgctgttaaaaggacaattacaaacaggaatcgaatgcaaccggcgcaggaacactgccagcgcatcaacaatattttcacctgaatcaggatattcttctaatacctggaatgctgttttcccggggatcgcagtggtgagtaaccatgcatcatcaggagtacggataaaatgcttgatggtcggaagaggcataaattccgtcagccagtttagtctgaccatctcatctgtaacatcattggcaacgctacctttgccatgtttcagaaacaactctggcgcatcgggcttcccatacaatcgatagattgtcgcacctgattgcccgacattatcgcgagcccatttatacccatataaatcagcatccatgttggaatttaatcgcggcctcgagcaagacgtttcccgttgaatatggctcataacaccccttgtattactgtttatgtaagcagacagttttattgttcatgatgatatatttttatcttgtgcaatgtaacatcagagattttgagacacaacgtggctttccccccccccccattattgaagcatttatcagggttattgtctcatgagcggatacatatttgaatgtatttagaaaaataaacaaataggggttccgcgcacatttccccgaaaagtgccacctgacgtctaagaaaccattattatcatgacattaacctataaaaataggcgtatcacgaggccctttcgtc

SEQ ID NO: 29 - DNA, 6129 bp, Artificial Sequence
  Plasmid DNA: 53367
tcgcgcgtttcggtgatgacggtgaaaacctctgacacatgcagctcccggagacggtcacagcttgtctgtaagcggatgccgggagcagacaagcccgtcagggcgcgtcagcgggtgttggcgggtgtcggggctggcttaactatgcggcatcagagcagattgtactgagagtgcaccatatgcggtgtgaaataccgcacagatgcgtaaggagaaaataccgcatcagattggctattggccattgcatacgttgtatccatatcataatatgtacatttatattggctcatgtccaacattaccgccatgttgacattgattattgactagttattaatagtaatcaattacgggaacttccatagcccatatatggagttccgcgttacataacttacgggaatttccaaacctggctgaccgcccaacgacccccgcccattgacgtcaataatgacgtatgttcccatagtaacgccaatagggaacttccattgacgtcaatgggtggagtatttacggtaaactgcccacttgggaatttccaagtgtatcatatgccaagtacgccccctattgacgtcaatgacgggaacttccataagcttgcattatgcccagtacatgaccttatgggaatttcctacttggcagtacatctacgtattagtcatcgctattaccatggtgatgcggttttggcagtacatcaatgggcgtggatagcggtttgactcacgggaacttccaagtctccaccccattgacgtcaatgggagtttgttttgactcaccaaaatcaacgggaattcccaaaatgtcgtaacaactccgccccattgacgcaaatgggcggtaggcgtgtacggtgggaggtctatataagcagagctcgtttagtgaaccgtcagatcgcctggagacgccatccacgctgttttgacctccatagaagacaccgggaccgatccagcctccatcggctcgcatctctccttcacgcgcccgccgccctacctgaggccgccatccacgccggttgagtcgcgttctgccgcctcccgcctgtggtgcctcctgaactgcgtccgccgtctaggtaagtttaaagctcaggtcgagaccgggcctttgtccggcgctcccttggagcctacctagactcagccggctctccacgctttgcctgaccctgcttgctcaactctagttaacggtggagggcagtgtagtctgagcagtactcgttgctgccgcgcgcgccaccagacataatagctgacagactaacagactgttcctttccatgggtcttttctgcagtcaccgtcgtcgacacgtgtgatcagatatcgcggccgctctagagatatcgccaccatgatcgccctgattctggtggccctggccctgtctcacacagcctacagccagatcaccaatggcaccaccggcaaccctatcatctgtctgggacaccacgccgtggagaatggcaccagcgtgaaaaccctgaccgacaaccatgtggaagtggtgtctgccaaggaactggtggagaccaaccacaccgatgagctgtgtcctagccctctgaaactggtggatggccaggattgccacctgatcaatggcgccctgggatctcctggatgtgacaggctgcaggacaccacctgggatgtgttcatcgagagacccaccgccgtggatacctgctaccccttcgacgtgcctgattaccagagcctgaggagcattctggccagctctggcagcctggagtttatcgccgagcagttcacctggaatggcgtgaaagtggatggcagcagctctgcctgtctgagaggcggcaggaacagcttcttcagcaggctgaactggctgaccaaggccaccaacggcaattacggccccatcaacgtgaccaaggagaacacaggcagctatgtgagactgtatctgtggggagtgcaccaccctagcagcgataacgagcagaccgacctgtataaggtggccaccggcagagtgacagtgagcaccaggagcgaccagatcagcatcgtgcccaacatcggcagcagacccagagtgagaaaccagagcggcaggatcagcatctactggaccctggtgaatcctggcgacagcatcatcttcaacagcatcggcaacctgattgctcctaggggacactacaagatcagcaagagcaccaagtccaccgtgctgaagagcgacaagagaatcggcagctgtaccagcccttgcctgacagataagggcagcatccagtccgataagcccttccagaacgtgtccagaatcgccatcggcaactgccctaagtatgtgaagcagggctctctgatgctggccacaggcatgagaaacatcccccagagagagaccagaggactgtttggagccatcgccggattcatcgagaatggctggcagggactgatcgatggctggtacggcttcagacaccagaatgccgagggaacaggaacagccgccgatctgaagtctacacaggccgctattgaccagatcaacggcaagctgaaccggctgatcgagaaaaccaacgagaagtaccaccagatcgagaaggaattcgagcaggtggagggcagaatccaggacctggagaagtacgtggaggacaccaagatcgacctgtggagctacaatgccgaactgctggtggccctggagaatcagcacaccatcgacgtgaccgacagcgagatgaacaagctgttcgagagagtgaggaggcagctgagagagaacgccgaggatcagggcaatggctgcttcgagatcttccaccagtgtgacaacaactgtatcgagagcatccggaacggcacctacgaccacaacatctacagggacgaggccatcaacaaccggatcaagatcaacagcggcagactggtgcctagaggatctcctggcagcggatatattcctgaggcccctagagatggacaggcctatgtgagaaaggatggcgaatgggtgctgctgtctacatttctgggacaccaccatcaccaccattgatgaacacgtgggatccagatctgctgtgccttctagttgccagccatctgttgtttgcccctcccccgtgccttccttgaccctggaaggtgccactcccactgtcctttcctaataaaatgaggaaattgcatcgcattgtctgagtaggtgtcattctattctggggggtggggtggggcaggacagcaagggggaggattgggaagacaatagcaggcatgctggggatgcggtgggctctatgggtacccaggtgctgaagaattgacccggttcctcctgggccagaaagaagcaggcacatccccttctctgtgacacaccctgtccacgcccctggttcttagttccagccccactcataggacactcatagctcaggagggctccgccttcaatcccacccgctaaagtacttggagcggtctctccctccctcatcagcccaccaaaccaaacctagcctccaagagtgggaagaaattaaagcaagataggctattaagtgcagagggagagaaaatgcctccaacatgtgaggaagtaatgagagaaatcatagaattttaaggccatgatttaaggccatcatggccttaatcttccgcttcctcgctcactgactcgctgcgctcggtcgttcggctgcggcgagcggtatcagctcactcaaaggcggtaatacggttatccacagaatcaggggataacgcaggaaagaacatgtgagcaaaaggccagcaaaaggccaggaaccgtaaaaaggccgcgttgctggcgtttttccataggctccgcccccctgacgagcatcacaaaaatcgacgctcaagtcagaggtggcgaaacccgacaggactataaagataccaggcgtttccccctggaagctccctcgtgcgctctcctgttccgaccctgccgcttaccggatacctgtccgcctttctcccttcgggaagcgtggcgctttctcatagctcacgctgtaggtatctcagttcggtgtaggtcgttcgctccaagctgggctgtgtgcacgaaccccccgttcagcccgaccgctgcgccttatccggtaactatcgtcttgagtccaacccggtaagacacgacttatcgccactggcagcagccactggtaacaggattagcagagcgaggtatgtaggcggtgctacagagttcttgaagtggtggcctaactacggctacactagaagaacagtatttggtatctgcgctctgctgaagccagttaccttcggaaaaagagttggtagctcttgatccggcaaacaaaccaccgctggtagcggtggtttttttgtttgcaagcagcagattacgcgcagaaaaaaaggatctcaagaagatcctttgatcttttctacggggtctgacgctcagtggaacgaaaactcacgttaagggattttggtcatgagattatcaaaaaggatcttcacctagatccttttaaattaaaaatgaagttttaaatcaatctaaagtatatatgagtaaacttggtctgacagttaccaatgcttaatcagtgaggcacctatctcagcgatctgtctatttcgttcatccatagttgcctgactcggggggggggggcgctgaggtctgcctcgtgaagaaggtgttgctgactcataccaggcctgaatcgccccatcatccagccagaaagtgagggagccacggttgatgagagctttgttgtaggtggaccagttggtgattttgaacttttgctttgccacggaacggtctgcgttgtcgggaagatgcgtgatctgatccttcaactcagcaaaagttcgatttattcaacaaagccgccgtcccgtcaagtcagcgtaatgctctgccagtgttacaaccaattaaccaattctgattagaaaaactcatcgagcatcaaatgaaactgcaatttattcatatcaggattatcaataccatatttttgaaaaagccgtttctgtaatgaaggagaaaactcaccgaggcagttccataggatggcaagatcctggtatcggtctgcgattccgactcgtccaacatcaatacaacctattaatttcccctcgtcaaaaataaggttatcaagtgagaaatcaccatgagtgacgactgaatccggtgagaatggcaaaagcttatgcatttctttccagacttgttcaacaggccagccattacgctcgtcatcaaaatcactcgcatcaaccaaaccgttattcattcgtgattgcgcctgagcgagacgaaatacgcgatcgctgttaaaaggacaattacaaacaggaatcgaatgcaaccggcgcaggaacactgccagcgcatcaacaatattttcacctgaatcaggatattcttctaatacctggaatgctgttttcccggggatcgcagtggtgagtaaccatgcatcatcaggagtacggataaaatgcttgatggtcggaagaggcataaattccgtcagccagtttagtctgaccatctcatctgtaacatcattggcaacgctacctttgccatgtttcagaaacaactctggcgcatcgggcttcccatacaatcgatagattgtcgcacctgattgcccgacattatcgcgagcccatttatacccatataaatcagcatccatgttggaatttaatcgcggcctcgagcaagacgtttcccgttgaatatggctcataacaccccttgtattactgtttatgtaagcagacagttttattgttcatgatgatatatttttatcttgtgcaatgtaacatcagagattttgagacacaacgtggctttccccccccccccattattgaagcatttatcagggttattgtctcatgagcggatacatatttgaatgtatttagaaaaataaacaaataggggttccgcgcacatttccccgaaaagtgccacctgacgtctaagaaaccattattatcatgacattaacctataaaaataggcgtatcacgaggccctttcgtc

SEQ ID NO: 30 - DNA, 6120 bp, Artificial Sequence
  Plasmid DNA: 53320
tcgcgcgtttcggtgatgacggtgaaaacctctgacacatgcagctcccggagacggtcacagcttgtctgtaagcggatgccgggagcagacaagcccgtcagggcgcgtcagcgggtgttggcgggtgtcggggctggcttaactatgcggcatcagagcagattgtactgagagtgcaccatatgcggtgtgaaataccgcacagatgcgtaaggagaaaataccgcatcagattggctattggccattgcatacgttgtatccatatcataatatgtacatttatattggctcatgtccaacattaccgccatgttgacattgattattgactagttattaatagtaatcaattacgggaacttccatagcccatatatggagttccgcgttacataacttacgggaatttccaaacctggctgaccgcccaacgacccccgcccattgacgtcaataatgacgtatgttcccatagtaacgccaatagggaacttccattgacgtcaatgggtggagtatttacggtaaactgcccacttgggaatttccaagtgtatcatatgccaagtacgccccctattgacgtcaatgacgggaacttccataagcttgcattatgcccagtacatgaccttatgggaatttcctacttggcagtacatctacgtattagtcatcgctattaccatggtgatgcggttttggcagtacatcaatgggcgtggatagcggtttgactcacgggaacttccaagtctccaccccattgacgtcaatgggagtttgttttgactcaccaaaatcaacgggaattcccaaaatgtcgtaacaactccgccccattgacgcaaatgggcggtaggcgtgtacggtgggaggtctatataagcagagctcgtttagtgaaccgtcagatcgcctggagacgccatccacgctgttttgacctccatagaagacaccgggaccgatccagcctccatcggctcgcatctctccttcacgcgcccgccgccctacctgaggccgccatccacgccggttgagtcgcgttctgccgcctcccgcctgtggtgcctcctgaactgcgtccgccgtctaggtaagtttaaagctcaggtcgagaccgggcctttgtccggcgctcccttggagcctacctagactcagccggctctccacgctttgcctgaccctgcttgctcaactctagttaacggtggagggcagtgtagtctgagcagtactcgttgctgccgcgcgcgccaccagacataatagctgacagactaacagactgttcctttccatgggtcttttctgcagtcaccgtcgtcgacacgtgtgatcagatatcgcggccgctctagagatatcgccaccatgctgtccatcgccatcctgtttctgctgatcgccgagggcagcagccagaattacaccggcaaccccgtgatttgtctgggacaccacgccgtgtctaatggcaccatggtgaaaaccctgaccgacgaccagatcgaagtggtgacagcccaggaactggtcgaatctcagcacctgcctgagctgtgtccttctcccctgagactggtggatggccagacctgtgacatcgtgaatggcgccctgggatctcctggatgtgaccacctgaatggagccgagtgggacgtgttcatcgagagacctaccgccgtggatacctgctaccccttcgacgtgcctgattaccagagcctgaggagcatcctggccaacaacggcaagttcgagttcatcgccgaggagttccagtggaacaccgtgaagcagaatggcaagagcggcgcctgtaaaagggccaacgtgaacgacttcttcaaccggctgaactggctgacaaagagcgatggcaacgcctaccctctgcagaatctgaccaaggtgaacaacggcgactacgccagactgtatatctggggcgtgcaccacccttctaccgataccgagcagaccaacctgtacaagaacaaccccggcagagtgacagtgagcacccagaccagccagacaagcgtggtgcctaacatcggaagcagaccttgggtgaggggactgagcagcaggatcagcttctactggaccatcgtggagcctggcgatctgatcgtgttcaacaccatcggcaacctgattgcccctaggggccactacaagctgaacagccagaagaagagcaccatcctgaataccgccgtgcctatcggctcttgtgtgagcaagtgccacaccgataagggcagcatcagcaccaccaagcccttccagaacatcagccggatcagcatcggcgattgccccaagtatgtgaagcagggcagcctgaaactggccaccggcatgagaaacatccccgagaaggccaccagaggactgtttggagccatcgccggattcatcgagaatggctggcagggactgatcgatggctggtacggcttcagacaccagaatgccgagggaacaggaacagccgccgatctgaagtctacacaggccgccatcgaccagatcaacggcaagctgaaccggctgatcgagaagcccaacgagaagtaccaccagatcgagaaggaattcgagcaggtggagggcagaatccaggacctggagaagtacgtggaggacaccaagatcgacctgtggagctacaatgccgaactgctggtggccctggagaatcagcacaccatcgacgtgaccgacagcgagatgaacaagctgttcgagagagtgaggcaccagctgagagagaacgccgaggataagggcaatggctgcttcgagatcttccaccagtgtgacaacagctgtatcgagagcatccggaacggcacctacgatcacgacatctacagggacgaggccatcaacaaccggtttcagatccagggcgtgaagctgatccagggctacaaggacatcatcctgtggttcagcttcagcatcagctgctttctgctcgtcgctctgctgctggcctttattctgtgggcctgccagaacggcaatatccggtgccagatctgtatctgatgaacacgtgggatccagatctgctgtgccttctagttgccagccatctgttgtttgcccctcccccgtgccttccttgaccctggaaggtgccactcccactgtcctttcctaataaaatgaggaaattgcatcgcattgtctgagtaggtgtcattctattctggggggtggggtggggcaggacagcaagggggaggattgggaagacaatagcaggcatgctggggatgcggtgggctctatgggtacccaggtgctgaagaattgacccggttcctcctgggccagaaagaagcaggcacatccccttctctgtgacacaccctgtccacgcccctggttcttagttccagccccactcataggacactcatagctcaggagggctccgccttcaatcccacccgctaaagtacttggagcggtctctccctccctcatcagcccaccaaaccaaacctagcctccaagagtgggaagaaattaaagcaagataggctattaagtgcagagggagagaaaatgcctccaacatgtgaggaagtaatgagagaaatcatagaattttaaggccatgatttaaggccatcatggccttaatcttccgcttcctcgctcactgactcgctgcgctcggtcgttcggctgcggcgagcggtatcagctcactcaaaggcggtaatacggttatccacagaatcaggggataacgcaggaaagaacatgtgagcaaaaggccagcaaaaggccaggaaccgtaaaaaggccgcgttgctggcgtttttccataggctccgcccccctgacgagcatcacaaaaatcgacgctcaagtcagaggtggcgaaacccgacaggactataaagataccaggcgtttccccctggaagctccctcgtgcgctctcctgttccgaccctgccgcttaccggatacctgtccgcctttctcccttcgggaagcgtggcgctttctcatagctcacgctgtaggtatctcagttcggtgtaggtcgttcgctccaagctgggctgtgtgcacgaaccccccgttcagcccgaccgctgcgccttatccggtaactatcgtcttgagtccaacccggtaagacacgacttatcgccactggcagcagccactggtaacaggattagcagagcgaggtatgtaggcggtgctacagagttcttgaagtggtggcctaactacggctacactagaagaacagtatttggtatctgcgctctgctgaagccagttaccttcggaaaaagagttggtagctcttgatccggcaaacaaaccaccgctggtagcggtggtttttttgtttgcaagcagcagattacgcgcagaaaaaaaggatctcaagaagatcctttgatcttttctacggggtctgacgctcagtggaacgaaaactcacgttaagggattttggtcatgagattatcaaaaaggatcttcacctagatccttttaaattaaaaatgaagttttaaatcaatctaaagtatatatgagtaaacttggtctgacagttaccaatgcttaatcagtgaggcacctatctcagcgatctgtctatttcgttcatccatagttgcctgactcggggggggggggcgctgaggtctgcctcgtgaagaaggtgttgctgactcataccaggcctgaatcgccccatcatccagccagaaagtgagggagccacggttgatgagagctttgttgtaggtggaccagttggtgattttgaacttttgctttgccacggaacggtctgcgttgtcgggaagatgcgtgatctgatccttcaactcagcaaaagttcgatttattcaacaaagccgccgtcccgtcaagtcagcgtaatgctctgccagtgttacaaccaattaaccaattctgattagaaaaactcatcgagcatcaaatgaaactgcaatttattcatatcaggattatcaataccatatttttgaaaaagccgtttctgtaatgaaggagaaaactcaccgaggcagttccataggatggcaagatcctggtatcggtctgcgattccgactcgtccaacatcaatacaacctattaatttcccctcgtcaaaaataaggttatcaagtgagaaatcaccatgagtgacgactgaatccggtgagaatggcaaaagcttatgcatttctttccagacttgttcaacaggccagccattacgctcgtcatcaaaatcactcgcatcaaccaaaccgttattcattcgtgattgcgcctgagcgagacgaaatacgcgatcgctgttaaaaggacaattacaaacaggaatcgaatgcaaccggcgcaggaacactgccagcgcatcaacaatattttcacctgaatcaggatattcttctaatacctggaatgctgttttcccggggatcgcagtggtgagtaaccatgcatcatcaggagtacggataaaatgcttgatggtcggaagaggcataaattccgtcagccagtttagtctgaccatctcatctgtaacatcattggcaacgctacctttgccatgtttcagaaacaactctggcgcatcgggcttcccatacaatcgatagattgtcgcacctgattgcccgacattatcgcgagcccatttatacccatataaatcagcatccatgttggaatttaatcgcggcctcgagcaagacgtttcccgttgaatatggctcataacaccccttgtattactgtttatgtaagcagacagttttattgttcatgatgatatatttttatcttgtgcaatgtaacatcagagattttgagacacaacgtggctttccccccccccccattattgaagcatttatcagggttattgtctcatgagcggatacatatttgaatgtatttagaaaaataaacaaataggggttccgcgcacatttccccgaaaagtgccacctgacgtctaagaaaccattattatcatgacattaacctataaaaataggcgtatcacgaggccctttcgtc

SEQ ID NO: 31 - DNA, 6117 bp, Artificial Sequence
  Plasmid DNA: 53322
tcgcgcgtttcggtgatgacggtgaaaacctctgacacatgcagctcccggagacggtcacagcttgtctgtaagcggatgccgggagcagacaagcccgtcagggcgcgtcagcgggtgttggcgggtgtcggggctggcttaactatgcggcatcagagcagattgtactgagagtgcaccatatgcggtgtgaaataccgcacagatgcgtaaggagaaaataccgcatcagattggctattggccattgcatacgttgtatccatatcataatatgtacatttatattggctcatgtccaacattaccgccatgttgacattgattattgactagttattaatagtaatcaattacgggaacttccatagcccatatatggagttccgcgttacataacttacgggaatttccaaacctggctgaccgcccaacgacccccgcccattgacgtcaataatgacgtatgttcccatagtaacgccaatagggaacttccattgacgtcaatgggtggagtatttacggtaaactgcccacttgggaatttccaagtgtatcatatgccaagtacgccccctattgacgtcaatgacgggaacttccataagcttgcattatgcccagtacatgaccttatgggaatttcctacttggcagtacatctacgtattagtcatcgctattaccatggtgatgcggttttggcagtacatcaatgggcgtggatagcggtttgactcacgggaacttccaagtctccaccccattgacgtcaatgggagtttgttttgactcaccaaaatcaacgggaattcccaaaatgtcgtaacaactccgccccattgacgcaaatgggcggtaggcgtgtacggtgggaggtctatataagcagagctcgtttagtgaaccgtcagatcgcctggagacgccatccacgctgttttgacctccatagaagacaccgggaccgatccagcctccatcggctcgcatctctccttcacgcgcccgccgccctacctgaggccgccatccacgccggttgagtcgcgttctgccgcctcccgcctgtggtgcctcctgaactgcgtccgccgtctaggtaagtttaaagctcaggtcgagaccgggcctttgtccggcgctcccttggagcctacctagactcagccggctctccacgctttgcctgaccctgcttgctcaactctagttaacggtggagggcagtgtagtctgagcagtactcgttgctgccgcgcgcgccaccagacataatagctgacagactaacagactgttcctttccatgggtcttttctgcagtcaccgtcgtcgacacgtgtgatcagatatcgcggccgctctagagatatcgccaccatgctgtccatcgccatcctgtttctgctgatcgccgagggcagcagccagaattacaccggcaaccccgtgatttgtctgggacaccacgccgtgtctaatggcaccatggtgaaaaccctgaccgacgaccagatcgaagtggtgacagcccaggaactggtcgaatctcagcacctgcctgagctgtgtccttctcccctgagactggtggatggccagacctgtgacatcgtgaatggcgccctgggatctcctggatgtgaccacctgaatggagccgagtgggacgtgttcatcgagagacctaccgccgtggatacctgctaccccttcgacgtgcctgattaccagagcctgaggagcatcctggccaacaacggcaagttcgagttcatcgccgaggagttccagtggaacaccgtgaagcagaatggcaagagcggcgcctgtaaaagggccaacgtgaacgacttcttcaaccggctgaactggctgacaaagagcgatggcaacgcctaccctctgcagaatctgaccaaggtgaacaacggcgactacgccagactgtatatctggggcgtgcaccacccttctaccgataccgagcagaccaacctgtacaagaacaaccccggcagagtgacagtgagcacccagaccagccagacaagcgtggtgcctaacatcggaagcagaccttgggtgaggggactgagcagcaggatcagcttctactggaccatcgtggagcctggcgatctgatcgtgttcaacaccatcggcaacctgattgcccctaggggccactacaagctgaacagccagaagaagagcaccatcctgaataccgccgtgcctatcggctcttgtgtgagcaagtgccacaccgataagggcagcatcagcaccaccaagcccttccagaacatcagccggatcagcatcggcgattgccccaagtatgtgaagcagggcagcctgaaactggccaccggcatgagaaacatcccccagagagagaccagaggactgtttggagccatcgccggattcatcgagaatggctggcagggactgatcgatggctggtacggcttcagacaccagaatgccgagggaacaggaacagccgccgatctgaagtctacacaggccgccatcgaccagatcaacggcaagctgaaccggctgatcgagaagcccaacgagaagtaccaccagatcgagaaggaattcgagcaggtggagggcagaatccaggacctggagaagtacgtggaggacaccaagatcgacctgtggagctacaatgccgaactgctggtggccctggagaatcagcacaccatcgacgtgaccgacagcgagatgaacaagctgttcgagagagtgaggcaccagctgagagagaacgccgaggataagggcaatggctgcttcgagatcttccaccagtgtgacaacagctgtatcgagagcatccggaacggcacctacgatcacgacatctacagggacgaggccatcaacaaccggtttcagatccagagcggcagactggtgcctagaggatctcctggcagcggatatattcctgaggcccctagagatggacaggcctatgtgagaaaggatggcgaatgggtgctgctgtctacatttctgggacaccaccatcaccaccattgatgaacacgtgggatccagatctgctgtgccttctagttgccagccatctgttgtttgcccctcccccgtgccttccttgaccctggaaggtgccactcccactgtcctttcctaataaaatgaggaaattgcatcgcattgtctgagtaggtgtcattctattctggggggtggggtggggcaggacagcaagggggaggattgggaagacaatagcaggcatgctggggatgcggtgggctctatgggtacccaggtgctgaagaattgacccggttcctcctgggccagaaagaagcaggcacatccccttctctgtgacacaccctgtccacgcccctggttcttagttccagccccactcataggacactcatagctcaggagggctccgccttcaatcccacccgctaaagtacttggagcggtctctccctccctcatcagcccaccaaaccaaacctagcctccaagagtgggaagaaattaaagcaagataggctattaagtgcagagggagagaaaatgcctccaacatgtgaggaagtaatgagagaaatcatagaattttaaggccatgatttaaggccatcatggccttaatcttccgcttcctcgctcactgactcgctgcgctcggtcgttcggctgcggcgagcggtatcagctcactcaaaggcggtaatacggttatccacagaatcaggggataacgcaggaaagaacatgtgagcaaaaggccagcaaaaggccaggaaccgtaaaaaggccgcgttgctggcgtttttccataggctccgcccccctgacgagcatcacaaaaatcgacgctcaagtcagaggtggcgaaacccgacaggactataaagataccaggcgtttccccctggaagctccctcgtgcgctctcctgttccgaccctgccgcttaccggatacctgtccgcctttctcccttcgggaagcgtggcgctttctcatagctcacgctgtaggtatctcagttcggtgtaggtcgttcgctccaagctgggctgtgtgcacgaaccccccgttcagcccgaccgctgcgccttatccggtaactatcgtcttgagtccaacccggtaagacacgacttatcgccactggcagcagccactggtaacaggattagcagagcgaggtatgtaggcggtgctacagagttcttgaagtggtggcctaactacggctacactagaagaacagtatttggtatctgcgctctgctgaagccagttaccttcggaaaaagagttggtagctcttgatccggcaaacaaaccaccgctggtagcggtggtttttttgtttgcaagcagcagattacgcgcagaaaaaaaggatctcaagaagatcctttgatcttttctacggggtctgacgctcagtggaacgaaaactcacgttaagggattttggtcatgagattatcaaaaaggatcttcacctagatccttttaaattaaaaatgaagttttaaatcaatctaaagtatatatgagtaaacttggtctgacagttaccaatgcttaatcagtgaggcacctatctcagcgatctgtctatttcgttcatccatagttgcctgactcggggggggggggcgctgaggtctgcctcgtgaagaaggtgttgctgactcataccaggcctgaatcgccccatcatccagccagaaagtgagggagccacggttgatgagagctttgttgtaggtggaccagttggtgattttgaacttttgctttgccacggaacggtctgcgttgtcgggaagatgcgtgatctgatccttcaactcagcaaaagttcgatttattcaacaaagccgccgtcccgtcaagtcagcgtaatgctctgccagtgttacaaccaattaaccaattctgattagaaaaactcatcgagcatcaaatgaaactgcaatttattcatatcaggattatcaataccatatttttgaaaaagccgtttctgtaatgaaggagaaaactcaccgaggcagttccataggatggcaagatcctggtatcggtctgcgattccgactcgtccaacatcaatacaacctattaatttcccctcgtcaaaaataaggttatcaagtgagaaatcaccatgagtgacgactgaatccggtgagaatggcaaaagcttatgcatttctttccagacttgttcaacaggccagccattacgctcgtcatcaaaatcactcgcatcaaccaaaccgttattcattcgtgattgcgcctgagcgagacgaaatacgcgatcgctgttaaaaggacaattacaaacaggaatcgaatgcaaccggcgcaggaacactgccagcgcatcaacaatattttcacctgaatcaggatattcttctaatacctggaatgctgttttcccggggatcgcagtggtgagtaaccatgcatcatcaggagtacggataaaatgcttgatggtcggaagaggcataaattccgtcagccagtttagtctgaccatctcatctgtaacatcattggcaacgctacctttgccatgtttcagaaacaactctggcgcatcgggcttcccatacaatcgatagattgtcgcacctgattgcccgacattatcgcgagcccatttatacccatataaatcagcatccatgttggaatttaatcgcggcctcgagcaagacgtttcccgttgaatatggctcataacaccccttgtattactgtttatgtaagcagacagttttattgttcatgatgatatatttttatcttgtgcaatgtaacatcagagattttgagacacaacgtggctttccccccccccccattattgaagcatttatcagggttattgtctcatgagcggatacatatttgaatgtatttagaaaaataaacaaataggggttccgcgcacatttccccgaaaagtgccacctgacgtctaagaaaccattattatcatgacattaacctataaaaataggcgtatcacgaggccctttcgtc

SEQ ID NO: 32 - DNA, 6102 bp, Artificial Sequence
  Plasmid DNA: 53325
tcgcgcgtttcggtgatgacggtgaaaacctctgacacatgcagctcccggagacggtcacagcttgtctgtaagcggatgccgggagcagacaagcccgtcagggcgcgtcagcgggtgttggcgggtgtcggggctggcttaactatgcggcatcagagcagattgtactgagagtgcaccatatgcggtgtgaaataccgcacagatgcgtaaggagaaaataccgcatcagattggctattggccattgcatacgttgtatccatatcataatatgtacatttatattggctcatgtccaacattaccgccatgttgacattgattattgactagttattaatagtaatcaattacgggaacttccatagcccatatatggagttccgcgttacataacttacgggaatttccaaacctggctgaccgcccaacgacccccgcccattgacgtcaataatgacgtatgttcccatagtaacgccaatagggaacttccattgacgtcaatgggtggagtatttacggtaaactgcccacttgggaatttccaagtgtatcatatgccaagtacgccccctattgacgtcaatgacgggaacttccataagcttgcattatgcccagtacatgaccttatgggaatttcctacttggcagtacatctacgtattagtcatcgctattaccatggtgatgcggttttggcagtacatcaatgggcgtggatagcggtttgactcacgggaacttccaagtctccaccccattgacgtcaatgggagtttgttttgactcaccaaaatcaacgggaattcccaaaatgtcgtaacaactccgccccattgacgcaaatgggcggtaggcgtgtacggtgggaggtctatataagcagagctcgtttagtgaaccgtcagatcgcctggagacgccatccacgctgttttgacctccatagaagacaccgggaccgatccagcctccatcggctcgcatctctccttcacgcgcccgccgccctacctgaggccgccatccacgccggttgagtcgcgttctgccgcctcccgcctgtggtgcctcctgaactgcgtccgccgtctaggtaagtttaaagctcaggtcgagaccgggcctttgtccggcgctcccttggagcctacctagactcagccggctctccacgctttgcctgaccctgcttgctcaactctagttaacggtggagggcagtgtagtctgagcagtactcgttgctgccgcgcgcgccaccagacataatagctgacagactaacagactgttcctttccatgggtcttttctgcagtcaccgtcgtcgacacgtgtgatcagatatcgcggccgctctagagatatcgccaccatgaacacccagatcctgattctggccctggtggccatcattcccaccaacgccgacaagatctgtctgggacaccacgccgtgtctaatggcgccaaggtgaacaccctgaccgagaggggcgtggaagtggtgaatgccaccgagaccgtggagagaaccaacgtgcccaggatctgtagcaagggcaagagaaccgtggatctgggacagtgtggactgctgggcacaatcacaggacccccccagtgtgatcagttcctggagttcagcgccgatctgatcatcgagcggagagaaggcaacgatgtgtgctaccccggcaagttcgtgaatgaggaggccctgaggcagatcctgagaaagagcggcggcatcgacaaggaaaccatgggcttcacctacagcggcatcagaaccaatggagccacctccgcctgtagaagaagcggcagcagcttctacgccgagatgaagtggctgctgtccaacacagacaatgccgccttcccccagatgaccaagagctacaagaacatcaggaaggaccccgccctgatcatttggggcatccaccactctggatctacagccgagcagaccaagctgtatggcagcggcaacaagctgatcacagtgggcagcagcaattaccagcagagcttcgtgccttctcctggagccagacctcaggtgaacggccagagcggcagaatcgatttccactggctgatgctgaaccccaacgacaccgtgaccttcagcttcaacggcgcctttatcgcccctgatagggcctctttcctgaggggcaagagcatgggcatccagtctgaagtgcaggtggacgccaattgtgagggcgattgctaccacagcggcggcacaattctgagcagcctgcccttccagaacatcaacagcaggacagtgggcgagtgtcccagatatgtgaagcaggagagcctgctgctggccacaggcatgaagaacgtgccccagagagagacaagaggcctgtttggagccatcgccggattcatcgagaatggctgggagggactggtggatggctggtacggcttcagacaccagaatgcccagggagaaggaacagccgccgactacaagtctacacagagcgccatcgatcagatcaccggcaagctgaacaggctgatcgagaaaaccaatcagcagtttgagctgatcgacaacgagttcaccgaggtggagaagcagatcggcaacgtgatcaactggaccagagacagcctgacagagatgtggagctacaacgccgaactgctggtggccatggagaatcagcacaccatcgacctggccgacagcgagatgaacaagctgtacgagagagtgaggaggcagctgagagagaatgccgaggaggacggcacaggctgcttcgagatcttccacaagtgtgacgacgactgtatggccagcatccggaacaacacctacgaccacagcaagtacagagaggaggccatccagaacagaatccagatcgacagcggcagactggtgcctagaggatctcctggcagcggatatattcctgaggcccctagagatggacaggcctatgtgagaaaggatggcgaatgggtgctgctgtctacatttctgggacaccaccatcaccaccattgatgaacacgtgggatccagatctgctgtgccttctagttgccagccatctgttgtttgcccctcccccgtgccttccttgaccctggaaggtgccactcccactgtcctttcctaataaaatgaggaaattgcatcgcattgtctgagtaggtgtcattctattctggggggtggggtggggcaggacagcaagggggaggattgggaagacaatagcaggcatgctggggatgcggtgggctctatgggtacccaggtgctgaagaattgacccggttcctcctgggccagaaagaagcaggcacatccccttctctgtgacacaccctgtccacgcccctggttcttagttccagccccactcataggacactcatagctcaggagggctccgccttcaatcccacccgctaaagtacttggagcggtctctccctccctcatcagcccaccaaaccaaacctagcctccaagagtgggaagaaattaaagcaagataggctattaagtgcagagggagagaaaatgcctccaacatgtgaggaagtaatgagagaaatcatagaattttaaggccatgatttaaggccatcatggccttaatcttccgcttcctcgctcactgactcgctgcgctcggtcgttcggctgcggcgagcggtatcagctcactcaaaggcggtaatacggttatccacagaatcaggggataacgcaggaaagaacatgtgagcaaaaggccagcaaaaggccaggaaccgtaaaaaggccgcgttgctggcgtttttccataggctccgcccccctgacgagcatcacaaaaatcgacgctcaagtcagaggtggcgaaacccgacaggactataaagataccaggcgtttccccctggaagctccctcgtgcgctctcctgttccgaccctgccgcttaccggatacctgtccgcctttctcccttcgggaagcgtggcgctttctcatagctcacgctgtaggtatctcagttcggtgtaggtcgttcgctccaagctgggctgtgtgcacgaaccccccgttcagcccgaccgctgcgccttatccggtaactatcgtcttgagtccaacccggtaagacacgacttatcgccactggcagcagccactggtaacaggattagcagagcgaggtatgtaggcggtgctacagagttcttgaagtggtggcctaactacggctacactagaagaacagtatttggtatctgcgctctgctgaagccagttaccttcggaaaaagagttggtagctcttgatccggcaaacaaaccaccgctggtagcggtggtttttttgtttgcaagcagcagattacgcgcagaaaaaaaggatctcaagaagatcctttgatcttttctacggggtctgacgctcagtggaacgaaaactcacgttaagggattttggtcatgagattatcaaaaaggatcttcacctagatccttttaaattaaaaatgaagttttaaatcaatctaaagtatatatgagtaaacttggtctgacagttaccaatgcttaatcagtgaggcacctatctcagcgatctgtctatttcgttcatccatagttgcctgactcggggggggggggcgctgaggtctgcctcgtgaagaaggtgttgctgactcataccaggcctgaatcgccccatcatccagccagaaagtgagggagccacggttgatgagagctttgttgtaggtggaccagttggtgattttgaacttttgctttgccacggaacggtctgcgttgtcgggaagatgcgtgatctgatccttcaactcagcaaaagttcgatttattcaacaaagccgccgtcccgtcaagtcagcgtaatgctctgccagtgttacaaccaattaaccaattctgattagaaaaactcatcgagcatcaaatgaaactgcaatttattcatatcaggattatcaataccatatttttgaaaaagccgtttctgtaatgaaggagaaaactcaccgaggcagttccataggatggcaagatcctggtatcggtctgcgattccgactcgtccaacatcaatacaacctattaatttcccctcgtcaaaaataaggttatcaagtgagaaatcaccatgagtgacgactgaatccggtgagaatggcaaaagcttatgcatttctttccagacttgttcaacaggccagccattacgctcgtcatcaaaatcactcgcatcaaccaaaccgttattcattcgtgattgcgcctgagcgagacgaaatacgcgatcgctgttaaaaggacaattacaaacaggaatcgaatgcaaccggcgcaggaacactgccagcgcatcaacaatattttcacctgaatcaggatattcttctaatacctggaatgctgttttcccggggatcgcagtggtgagtaaccatgcatcatcaggagtacggataaaatgcttgatggtcggaagaggcataaattccgtcagccagtttagtctgaccatctcatctgtaacatcattggcaacgctacctttgccatgtttcagaaacaactctggcgcatcgggcttcccatacaatcgatagattgtcgcacctgattgcccgacattatcgcgagcccatttatacccatataaatcagcatccatgttggaatttaatcgcggcctcgagcaagacgtttcccgttgaatatggctcataacaccccttgtattactgtttatgtaagcagacagttttattgttcatgatgatatatttttatcttgtgcaatgtaacatcagagattttgagacacaacgtggctttccccccccccccattattgaagcatttatcagggttattgtctcatgagcggatacatatttgaatgtatttagaaaaataaacaaataggggttccgcgcacatttccccgaaaagtgccacctgacgtctaagaaaccattattatcatgacattaacctataaaaataggcgtatcacgaggccctttcgtc

SEQ ID NO: 33 - DNA, 6108 bp, Artificial Sequence
  Plasmid DNA: 53326
tcgcgcgtttcggtgatgacggtgaaaacctctgacacatgcagctcccggagacggtcacagcttgtctgtaagcggatgccgggagcagacaagcccgtcagggcgcgtcagcgggtgttggcgggtgtcggggctggcttaactatgcggcatcagagcagattgtactgagagtgcaccatatgcggtgtgaaataccgcacagatgcgtaaggagaaaataccgcatcagattggctattggccattgcatacgttgtatccatatcataatatgtacatttatattggctcatgtccaacattaccgccatgttgacattgattattgactagttattaatagtaatcaattacgggaacttccatagcccatatatggagttccgcgttacataacttacgggaatttccaaacctggctgaccgcccaacgacccccgcccattgacgtcaataatgacgtatgttcccatagtaacgccaatagggaacttccattgacgtcaatgggtggagtatttacggtaaactgcccacttgggaatttccaagtgtatcatatgccaagtacgccccctattgacgtcaatgacgggaacttccataagcttgcattatgcccagtacatgaccttatgggaatttcctacttggcagtacatctacgtattagtcatcgctattaccatggtgatgcggttttggcagtacatcaatgggcgtggatagcggtttgactcacgggaacttccaagtctccaccccattgacgtcaatgggagtttgttttgactcaccaaaatcaacgggaattcccaaaatgtcgtaacaactccgccccattgacgcaaatgggcggtaggcgtgtacggtgggaggtctatataagcagagctcgtttagtgaaccgtcagatcgcctggagacgccatccacgctgttttgacctccatagaagacaccgggaccgatccagcctccatcggctcgcatctctccttcacgcgcccgccgccctacctgaggccgccatccacgccggttgagtcgcgttctgccgcctcccgcctgtggtgcctcctgaactgcgtccgccgtctaggtaagtttaaagctcaggtcgagaccgggcctttgtccggcgctcccttggagcctacctagactcagccggctctccacgctttgcctgaccctgcttgctcaactctagttaacggtggagggcagtgtagtctgagcagtactcgttgctgccgcgcgcgccaccagacataatagctgacagactaacagactgttcctttccatgggtcttttctgcagtcaccgtcgtcgacacgtgtgatcagatatcgcggccgctctagagatatcgccaccatggagaccatcagcctgatcaccatcctgctggtggtgacagccagcaacgccgacaagatctgtatcggccaccagagcaccaatagcaccgagaccgtggataccctgaccgagaccaatgtgcctgtgacacacgccaaagagctgctgcacaccgagcacaatggaatgctgtgtgccacaagcctgggacaccctctgatcctggacacctgtacaatcgagggcctggtgtacggcaatcccagctgtgatctgctgctggagggccgggagtggagctacatcgtggagagaagcagcgccgtgaatggcacatgctaccccggcaacgtggagaatctggaggagctgaggaccctgtttagcagcgccagcagctaccagagaatccagatcttccccgacaccacctggaatgtgacctacaccggcacaagcagagcctgtagcggcagcttctaccggtctatgagatggctgacccagaagagcggcttttaccctgtgcaggacgcccagtacaccaacaaccggggcaagagcatcctgtttgtgtggggcattcaccaccctcctacctacaccgagcagaccaacctgtacatccggaacgacaccaccacaagcgtgaccaccgaggacctgaacagaaccttcaagcccgtgatcggacctagacctctggtgaatggcctgcagggcaggatcgattactactggagcgtgctgaagcctggacagaccctgagagtgaggagcaacggcaatctgatcgccccttggtatggacatgtgctgtctggaggaagccacggcagaatcctgaaaaccgacctgaagagcggcaattgtgtggtgcagtgccagacagagaagggcggcctgaatagcacactgcccttccacaacatcagcaagtacgccttcggcacctgtcccaagtatgtgagggtgaacagcctgaaactggctgtgggcctgagaaatgtgcctgccaggagcagcagaggactgtttggagccatcgccggattcatcgaagggggatggcctggactggtggccggatggtatggcttccagcacagcaatgatcagggagtgggaatggccgccgatagagactctacccagaaggccatcgacaagatcaccagcaaggtgaacaacatcgtggacaagatgaacaagcagtacgagatcatcgaccacgagttcagcgaggtggagaccaggctgaacatgatcaacaacaagatcgacgaccagatccaggatgtgtgggcctataatgccgaactgctggtgctgctggaaaaccagaaaaccctggacgagcacgacgccaacgtgaacaatctgtacaacaaggtgaagagagccctgggaagcaacgccatggaggatggcaagggctgctttgagctgtaccacaagtgtgacgaccagtgtatggagacaatcaggaacggcacctacaaccggaggaagtacagggaggagagcagactggagaggcagaaaatcgagggcgtgaagctggaatctgagggcgcctacaagatcctgaccatctacagcacagtggcctcttctctggtgctggccatgggatttgccgcctttctgttctgggccatgagcaatggcagctgccggtgtaacatctgtatctgatgaacacgtgggatccagatctgctgtgccttctagttgccagccatctgttgtttgcccctcccccgtgccttccttgaccctggaaggtgccactcccactgtcctttcctaataaaatgaggaaattgcatcgcattgtctgagtaggtgtcattctattctggggggtggggtggggcaggacagcaagggggaggattgggaagacaatagcaggcatgctggggatgcggtgggctctatgggtacccaggtgctgaagaattgacccggttcctcctgggccagaaagaagcaggcacatccccttctctgtgacacaccctgtccacgcccctggttcttagttccagccccactcataggacactcatagctcaggagggctccgccttcaatcccacccgctaaagtacttggagcggtctctccctccctcatcagcccaccaaaccaaacctagcctccaagagtgggaagaaattaaagcaagataggctattaagtgcagagggagagaaaatgcctccaacatgtgaggaagtaatgagagaaatcatagaattttaaggccatgatttaaggccatcatggccttaatcttccgcttcctcgctcactgactcgctgcgctcggtcgttcggctgcggcgagcggtatcagctcactcaaaggcggtaatacggttatccacagaatcaggggataacgcaggaaagaacatgtgagcaaaaggccagcaaaaggccaggaaccgtaaaaaggccgcgttgctggcgtttttccataggctccgcccccctgacgagcatcacaaaaatcgacgctcaagtcagaggtggcgaaacccgacaggactataaagataccaggcgtttccccctggaagctccctcgtgcgctctcctgttccgaccctgccgcttaccggatacctgtccgcctttctcccttcgggaagcgtggcgctttctcatagctcacgctgtaggtatctcagttcggtgtaggtcgttcgctccaagctgggctgtgtgcacgaaccccccgttcagcccgaccgctgcgccttatccggtaactatcgtcttgagtccaacccggtaagacacgacttatcgccactggcagcagccactggtaacaggattagcagagcgaggtatgtaggcggtgctacagagttcttgaagtggtggcctaactacggctacactagaagaacagtatttggtatctgcgctctgctgaagccagttaccttcggaaaaagagttggtagctcttgatccggcaaacaaaccaccgctggtagcggtggtttttttgtttgcaagcagcagattacgcgcagaaaaaaaggatctcaagaagatcctttgatcttttctacggggtctgacgctcagtggaacgaaaactcacgttaagggattttggtcatgagattatcaaaaaggatcttcacctagatccttttaaattaaaaatgaagttttaaatcaatctaaagtatatatgagtaaacttggtctgacagttaccaatgcttaatcagtgaggcacctatctcagcgatctgtctatttcgttcatccatagttgcctgactcggggggggggggcgctgaggtctgcctcgtgaagaaggtgttgctgactcataccaggcctgaatcgccccatcatccagccagaaagtgagggagccacggttgatgagagctttgttgtaggtggaccagttggtgattttgaacttttgctttgccacggaacggtctgcgttgtcgggaagatgcgtgatctgatccttcaactcagcaaaagttcgatttattcaacaaagccgccgtcccgtcaagtcagcgtaatgctctgccagtgttacaaccaattaaccaattctgattagaaaaactcatcgagcatcaaatgaaactgcaatttattcatatcaggattatcaataccatatttttgaaaaagccgtttctgtaatgaaggagaaaactcaccgaggcagttccataggatggcaagatcctggtatcggtctgcgattccgactcgtccaacatcaatacaacctattaatttcccctcgtcaaaaataaggttatcaagtgagaaatcaccatgagtgacgactgaatccggtgagaatggcaaaagcttatgcatttctttccagacttgttcaacaggccagccattacgctcgtcatcaaaatcactcgcatcaaccaaaccgttattcattcgtgattgcgcctgagcgagacgaaatacgcgatcgctgttaaaaggacaattacaaacaggaatcgaatgcaaccggcgcaggaacactgccagcgcatcaacaatattttcacctgaatcaggatattcttctaatacctggaatgctgttttcccggggatcgcagtggtgagtaaccatgcatcatcaggagtacggataaaatgcttgatggtcggaagaggcataaattccgtcagccagtttagtctgaccatctcatctgtaacatcattggcaacgctacctttgccatgtttcagaaacaactctggcgcatcgggcttcccatacaatcgatagattgtcgcacctgattgcccgacattatcgcgagcccatttatacccatataaatcagcatccatgttggaatttaatcgcggcctcgagcaagacgtttcccgttgaatatggctcataacaccccttgtattactgtttatgtaagcagacagttttattgttcatgatgatatatttttatcttgtgcaatgtaacatcagagattttgagacacaacgtggctttccccccccccccattattgaagcatttatcagggttattgtctcatgagcggatacatatttgaatgtatttagaaaaataaacaaataggggttccgcgcacatttccccgaaaagtgccacctgacgtctaagaaaccattattatcatgacattaacctataaaaataggcgtatcacgaggccctttcgtc

SEQ ID NO: 34 - DNA, 6102 bp, Artificial Sequence
  Plasmid DNA: 53328
tcgcgcgtttcggtgatgacggtgaaaacctctgacacatgcagctcccggagacggtcacagcttgtctgtaagcggatgccgggagcagacaagcccgtcagggcgcgtcagcgggtgttggcgggtgtcggggctggcttaactatgcggcatcagagcagattgtactgagagtgcaccatatgcggtgtgaaataccgcacagatgcgtaaggagaaaataccgcatcagattggctattggccattgcatacgttgtatccatatcataatatgtacatttatattggctcatgtccaacattaccgccatgttgacattgattattgactagttattaatagtaatcaattacgggaacttccatagcccatatatggagttccgcgttacataacttacgggaatttccaaacctggctgaccgcccaacgacccccgcccattgacgtcaataatgacgtatgttcccatagtaacgccaatagggaacttccattgacgtcaatgggtggagtatttacggtaaactgcccacttgggaatttccaagtgtatcatatgccaagtacgccccctattgacgtcaatgacgggaacttccataagcttgcattatgcccagtacatgaccttatgggaatttcctacttggcagtacatctacgtattagtcatcgctattaccatggtgatgcggttttggcagtacatcaatgggcgtggatagcggtttgactcacgggaacttccaagtctccaccccattgacgtcaatgggagtttgttttgactcaccaaaatcaacgggaattcccaaaatgtcgtaacaactccgccccattgacgcaaatgggcggtaggcgtgtacggtgggaggtctatataagcagagctcgtttagtgaaccgtcagatcgcctggagacgccatccacgctgttttgacctccatagaagacaccgggaccgatccagcctccatcggctcgcatctctccttcacgcgcccgccgccctacctgaggccgccatccacgccggttgagtcgcgttctgccgcctcccgcctgtggtgcctcctgaactgcgtccgccgtctaggtaagtttaaagctcaggtcgagaccgggcctttgtccggcgctcccttggagcctacctagactcagccggctctccacgctttgcctgaccctgcttgctcaactctagttaacggtggagggcagtgtagtctgagcagtactcgttgctgccgcgcgcgccaccagacataatagctgacagactaacagactgttcctttccatgggtcttttctgcagtcaccgtcgtcgacacgtgtgatcagatatcgcggccgctctagagatatcgccaccatggagaccatcagcctgatcaccatcctgctggtggtgacagccagcaacgccgacaagatctgtatcggccaccagagcaccaatagcaccgagaccgtggataccctgaccgagaccaatgtgcctgtgacacacgccaaagagctgctgcacaccgagcacaatggaatgctgtgtgccacaagcctgggacaccctctgatcctggacacctgtacaatcgagggcctggtgtacggcaatcccagctgtgatctgctgctggagggccgggagtggagctacatcgtggagagaagcagcgccgtgaatggcacatgctaccccggcaacgtggagaatctggaggagctgaggaccctgtttagcagcgccagcagctaccagagaatccagatcttccccgacaccacctggaatgtgacctacaccggcacaagcagagcctgtagcggcagcttctaccggtctatgagatggctgacccagaagagcggcttttaccctgtgcaggacgcccagtacaccaacaaccggggcaagagcatcctgtttgtgtggggcattcaccaccctcctacctacaccgagcagaccaacctgtacatccggaacgacaccaccacaagcgtgaccaccgaggacctgaacagaaccttcaagcccgtgatcggacctagacctctggtgaatggcctgcagggcaggatcgattactactggagcgtgctgaagcctggacagaccctgagagtgaggagcaacggcaatctgatcgccccttggtatggacatgtgctgtctggaggaagccacggcagaatcctgaaaaccgacctgaagagcggcaattgtgtggtgcagtgccagacagagaagggcggcctgaatagcacactgcccttccacaacatcagcaagtacgccttcggcacctgtcccaagtatgtgagggtgaacagcctgaaactggctgtgggcctgagaaatgtgcctcagagggagaccagaggactgtttggagccatcgccggattcatcgaagggggatggcctggactggtggccggatggtatggcttccagcacagcaatgatcagggagtgggaatggccgccgatagagactctacccagaaggccatcgacaagatcaccagcaaggtgaacaacatcgtggacaagatgaacaagcagtacgagatcatcgaccacgagttcagcgaggtggagaccaggctgaacatgatcaacaacaagatcgacgaccagatccaggatgtgtgggcctataatgccgaactgctggtgctgctggaaaaccagaaaaccctggacgagcacgacgccaacgtgaacaatctgtacaacaaggtgaagagagccctgggaagcaacgccatggaggatggcaagggctgctttgagctgtaccacaagtgtgacgaccagtgtatggagacaatcaggaacggcacctacaaccggaggaagtacagggaggagagcagactggagaggcagaaaatcgagagcggcagactggtgcctagaggatctcctggcagcggatatattcctgaggcccctagagatggacaggcctatgtgagaaaggatggcgaatgggtgctgctgtctacatttctgggacaccaccatcaccaccattgatgaacacgtgggatccagatctgctgtgccttctagttgccagccatctgttgtttgcccctcccccgtgccttccttgaccctggaaggtgccactcccactgtcctttcctaataaaatgaggaaattgcatcgcattgtctgagtaggtgtcattctattctggggggtggggtggggcaggacagcaagggggaggattgggaagacaatagcaggcatgctggggatgcggtgggctctatgggtacccaggtgctgaagaattgacccggttcctcctgggccagaaagaagcaggcacatccccttctctgtgacacaccctgtccacgcccctggttcttagttccagccccactcataggacactcatagctcaggagggctccgccttcaatcccacccgctaaagtacttggagcggtctctccctccctcatcagcccaccaaaccaaacctagcctccaagagtgggaagaaattaaagcaagataggctattaagtgcagagggagagaaaatgcctccaacatgtgaggaagtaatgagagaaatcatagaattttaaggccatgatttaaggccatcatggccttaatcttccgcttcctcgctcactgactcgctgcgctcggtcgttcggctgcggcgagcggtatcagctcactcaaaggcggtaatacggttatccacagaatcaggggataacgcaggaaagaacatgtgagcaaaaggccagcaaaaggccaggaaccgtaaaaaggccgcgttgctggcgtttttccataggctccgcccccctgacgagcatcacaaaaatcgacgctcaagtcagaggtggcgaaacccgacaggactataaagataccaggcgtttccccctggaagctccctcgtgcgctctcctgttccgaccctgccgcttaccggatacctgtccgcctttctcccttcgggaagcgtggcgctttctcatagctcacgctgtaggtatctcagttcggtgtaggtcgttcgctccaagctgggctgtgtgcacgaaccccccgttcagcccgaccgctgcgccttatccggtaactatcgtcttgagtccaacccggtaagacacgacttatcgccactggcagcagccactggtaacaggattagcagagcgaggtatgtaggcggtgctacagagttcttgaagtggtggcctaactacggctacactagaagaacagtatttggtatctgcgctctgctgaagccagttaccttcggaaaaagagttggtagctcttgatccggcaaacaaaccaccgctggtagcggtggtttttttgtttgcaagcagcagattacgcgcagaaaaaaaggatctcaagaagatcctttgatcttttctacggggtctgacgctcagtggaacgaaaactcacgttaagggattttggtcatgagattatcaaaaaggatcttcacctagatccttttaaattaaaaatgaagttttaaatcaatctaaagtatatatgagtaaacttggtctgacagttaccaatgcttaatcagtgaggcacctatctcagcgatctgtctatttcgttcatccatagttgcctgactcggggggggggggcgctgaggtctgcctcgtgaagaaggtgttgctgactcataccaggcctgaatcgccccatcatccagccagaaagtgagggagccacggttgatgagagctttgttgtaggtggaccagttggtgattttgaacttttgctttgccacggaacggtctgcgttgtcgggaagatgcgtgatctgatccttcaactcagcaaaagttcgatttattcaacaaagccgccgtcccgtcaagtcagcgtaatgctctgccagtgttacaaccaattaaccaattctgattagaaaaactcatcgagcatcaaatgaaactgcaatttattcatatcaggattatcaataccatatttttgaaaaagccgtttctgtaatgaaggagaaaactcaccgaggcagttccataggatggcaagatcctggtatcggtctgcgattccgactcgtccaacatcaatacaacctattaatttcccctcgtcaaaaataaggttatcaagtgagaaatcaccatgagtgacgactgaatccggtgagaatggcaaaagcttatgcatttctttccagacttgttcaacaggccagccattacgctcgtcatcaaaatcactcgcatcaaccaaaccgttattcattcgtgattgcgcctgagcgagacgaaatacgcgatcgctgttaaaaggacaattacaaacaggaatcgaatgcaaccggcgcaggaacactgccagcgcatcaacaatattttcacctgaatcaggatattcttctaatacctggaatgctgttttcccggggatcgcagtggtgagtaaccatgcatcatcaggagtacggataaaatgcttgatggtcggaagaggcataaattccgtcagccagtttagtctgaccatctcatctgtaacatcattggcaacgctacctttgccatgtttcagaaacaactctggcgcatcgggcttcccatacaatcgatagattgtcgcacctgattgcccgacattatcgcgagcccatttatacccatataaatcagcatccatgttggaatttaatcgcggcctcgagcaagacgtttcccgttgaatatggctcataacaccccttgtattactgtttatgtaagcagacagttttattgttcatgatgatatatttttatcttgtgcaatgtaacatcagagattttgagacacaacgtggctttccccccccccccattattgaagcatttatcagggttattgtctcatgagcggatacatatttgaatgtatttagaaaaataaacaaataggggttccgcgcacatttccccgaaaagtgccacctgacgtctaagaaaccattattatcatgacattaacctataaaaataggcgtatcacgaggccctttcgtc

SEQ ID NO: 35 - DNA, 6117 bp, Artificial Sequence
  Plasmid DNA: 53331
tcgcgcgtttcggtgatgacggtgaaaacctctgacacatgcagctcccggagacggtcacagcttgtctgtaagcggatgccgggagcagacaagcccgtcagggcgcgtcagcgggtgttggcgggtgtcggggctggcttaactatgcggcatcagagcagattgtactgagagtgcaccatatgcggtgtgaaataccgcacagatgcgtaaggagaaaataccgcatcagattggctattggccattgcatacgttgtatccatatcataatatgtacatttatattggctcatgtccaacattaccgccatgttgacattgattattgactagttattaatagtaatcaattacgggaacttccatagcccatatatggagttccgcgttacataacttacgggaatttccaaacctggctgaccgcccaacgacccccgcccattgacgtcaataatgacgtatgttcccatagtaacgccaatagggaacttccattgacgtcaatgggtggagtatttacggtaaactgcccacttgggaatttccaagtgtatcatatgccaagtacgccccctattgacgtcaatgacgggaacttccataagcttgcattatgcccagtacatgaccttatgggaatttcctacttggcagtacatctacgtattagtcatcgctattaccatggtgatgcggttttggcagtacatcaatgggcgtggatagcggtttgactcacgggaacttccaagtctccaccccattgacgtcaatgggagtttgttttgactcaccaaaatcaacgggaattcccaaaatgtcgtaacaactccgccccattgacgcaaatgggcggtaggcgtgtacggtgggaggtctatataagcagagctcgtttagtgaaccgtcagatcgcctggagacgccatccacgctgttttgacctccatagaagacaccgggaccgatccagcctccatcggctcgcatctctccttcacgcgcccgccgccctacctgaggccgccatccacgccggttgagtcgcgttctgccgcctcccgcctgtggtgcctcctgaactgcgtccgccgtctaggtaagtttaaagctcaggtcgagaccgggcctttgtccggcgctcccttggagcctacctagactcagccggctctccacgctttgcctgaccctgcttgctcaactctagttaacggtggagggcagtgtagtctgagcagtactcgttgctgccgcgcgcgccaccagacataatagctgacagactaacagactgttcctttccatgggtcttttctgcagtcaccgtcgtcgacacgtgtgatcagatatcgcggccgctctagagatatcgccaccatgaaggccaaactgctggtgctgctgtgtacctttaccgccacctacgccgacacaatctgtatcggctaccacgccaacaatagcaccgacaccgtggatacagtgctggagaagaacgtgaccgtgacccactctgtgaacctgctggaggacagccacaatggcaagctgtgtctgctgaaaggcattgcccctctgcagctgggcaattgttctgtggccggatggattctgggcaaccccgagtgtgagctgctgatttctaaggagagctggagctacatcgtggagacccccaatcctgagaatggcacctgctaccctggctacttcgccgattacgaggagctgcgcgagcagctgtctagcgtgtccagcttcgagagattcgagatcttccccaaggagtccagctggcctaatcacacagtgacaggcgtgtctgccagctgtagccacaacggcaaaagcagcttctaccggaacctgctgtggctgacaggcaagaatggcctgtaccccaacctgagcaagagctacgtgaacaacaaggaaaaggaagtgctggtgctgtggggagtgcaccaccctcccaacatcggaaatcagcgggccctgtaccacacagagaacgcctatgtgagcgtggtgtccagccactacagcagaagattcacccccgagatcgccaagagacccaaagtgagagaccaggagggccggatcaattactactggaccctgctggagcctggcgataccatcatcttcgaggccaacggcaatctgatcgccccttggtatgcctttgccctgagcagaggctttggcagcggcatcatcacaagcaacgcccccatggatgagtgtgatgccaagtgccagacacctcagggcgccatcaatagcagcctgcccttccagaatgtgcaccctgtgaccatcggcgagtgccccaagtatgtgagaagcgccaagctgagaatggtgaccggcctgagaaacatccctcagagggagaccagaggactgtttggagccatcgccggattcatcgagggaggatggacaggcatggtggatggctggtacggctaccaccaccagaatgagcagggctctggatatgccgccgatcagaagtctacccagaacgccatcaacggcatcaccaacaaggtgaacagcgtgatcgagaagatgaacacccagtttaccgctgtgggcaaggagttcaacaagctggagcggaggatggagaacctgaacaagaaggtggacgacggctttctggacatctggacctacaatgccgaactcctggtcctcctcgagaatgagaggaccctggacttccacgacagcaacgtgaagaacctgtatgagaaggtgaagagccagctgaagaacaacgccaaggagatcggcaacggctgcttcgagttctaccacaagtgtaacaacgagtgtatggagagcgtgaagaacggcacctacgactaccctaagtacagcgaggagagcaagctgaaccgggagaagatcgatagcggcagactggtgcctagaggatctcctggcagcggatatattcctgaggcccctagagatggacaggcctatgtgagaaaggatggcgaatgggtgctgctgtctacatttctgggacaccaccatcaccaccattgatgaacacgtgggatccagatctgctgtgccttctagttgccagccatctgttgtttgcccctcccccgtgccttccttgaccctggaaggtgccactcccactgtcctttcctaataaaatgaggaaattgcatcgcattgtctgagtaggtgtcattctattctggggggtggggtggggcaggacagcaagggggaggattgggaagacaatagcaggcatgctggggatgcggtgggctctatgggtacccaggtgctgaagaattgacccggttcctcctgggccagaaagaagcaggcacatccccttctctgtgacacaccctgtccacgcccctggttcttagttccagccccactcataggacactcatagctcaggagggctccgccttcaatcccacccgctaaagtacttggagcggtctctccctccctcatcagcccaccaaaccaaacctagcctccaagagtgggaagaaattaaagcaagataggctattaagtgcagagggagagaaaatgcctccaacatgtgaggaagtaatgagagaaatcatagaattttaaggccatgatttaaggccatcatggccttaatcttccgcttcctcgctcactgactcgctgcgctcggtcgttcggctgcggcgagcggtatcagctcactcaaaggcggtaatacggttatccacagaatcaggggataacgcaggaaagaacatgtgagcaaaaggccagcaaaaggccaggaaccgtaaaaaggccgcgttgctggcgtttttccataggctccgcccccctgacgagcatcacaaaaatcgacgctcaagtcagaggtggcgaaacccgacaggactataaagataccaggcgtttccccctggaagctccctcgtgcgctctcctgttccgaccctgccgcttaccggatacctgtccgcctttctcccttcgggaagcgtggcgctttctcatagctcacgctgtaggtatctcagttcggtgtaggtcgttcgctccaagctgggctgtgtgcacgaaccccccgttcagcccgaccgctgcgccttatccggtaactatcgtcttgagtccaacccggtaagacacgacttatcgccactggcagcagccactggtaacaggattagcagagcgaggtatgtaggcggtgctacagagttcttgaagtggtggcctaactacggctacactagaagaacagtatttggtatctgcgctctgctgaagccagttaccttcggaaaaagagttggtagctcttgatccggcaaacaaaccaccgctggtagcggtggtttttttgtttgcaagcagcagattacgcgcagaaaaaaaggatctcaagaagatcctttgatcttttctacggggtctgacgctcagtggaacgaaaactcacgttaagggattttggtcatgagattatcaaaaaggatcttcacctagatccttttaaattaaaaatgaagttttaaatcaatctaaagtatatatgagtaaacttggtctgacagttaccaatgcttaatcagtgaggcacctatctcagcgatctgtctatttcgttcatccatagttgcctgactcggggggggggggcgctgaggtctgcctcgtgaagaaggtgttgctgactcataccaggcctgaatcgccccatcatccagccagaaagtgagggagccacggttgatgagagctttgttgtaggtggaccagttggtgattttgaacttttgctttgccacggaacggtctgcgttgtcgggaagatgcgtgatctgatccttcaactcagcaaaagttcgatttattcaacaaagccgccgtcccgtcaagtcagcgtaatgctctgccagtgttacaaccaattaaccaattctgattagaaaaactcatcgagcatcaaatgaaactgcaatttattcatatcaggattatcaataccatatttttgaaaaagccgtttctgtaatgaaggagaaaactcaccgaggcagttccataggatggcaagatcctggtatcggtctgcgattccgactcgtccaacatcaatacaacctattaatttcccctcgtcaaaaataaggttatcaagtgagaaatcaccatgagtgacgactgaatccggtgagaatggcaaaagcttatgcatttctttccagacttgttcaacaggccagccattacgctcgtcatcaaaatcactcgcatcaaccaaaccgttattcattcgtgattgcgcctgagcgagacgaaatacgcgatcgctgttaaaaggacaattacaaacaggaatcgaatgcaaccggcgcaggaacactgccagcgcatcaacaatattttcacctgaatcaggatattcttctaatacctggaatgctgttttcccggggatcgcagtggtgagtaaccatgcatcatcaggagtacggataaaatgcttgatggtcggaagaggcataaattccgtcagccagtttagtctgaccatctcatctgtaacatcattggcaacgctacctttgccatgtttcagaaacaactctggcgcatcgggcttcccatacaatcgatagattgtcgcacctgattgcccgacattatcgcgagcccatttatacccatataaatcagcatccatgttggaatttaatcgcggcctcgagcaagacgtttcccgttgaatatggctcataacaccccttgtattactgtttatgtaagcagacagttttattgttcatgatgatatatttttatcttgtgcaatgtaacatcagagattttgagacacaacgtggctttccccccccccccattattgaagcatttatcagggttattgtctcatgagcggatacatatttgaatgtatttagaaaaataaacaaataggggttccgcgcacatttccccgaaaagtgccacctgacgtctaagaaaccattattatcatgacattaacctataaaaataggcgtatcacgaggccctttcgtc

SEQ ID NO: 36 - DNA, 6114 bp, Artificial Sequence
  Plasmid DNA: 53332
tcgcgcgtttcggtgatgacggtgaaaacctctgacacatgcagctcccggagacggtcacagcttgtctgtaagcggatgccgggagcagacaagcccgtcagggcgcgtcagcgggtgttggcgggtgtcggggctggcttaactatgcggcatcagagcagattgtactgagagtgcaccatatgcggtgtgaaataccgcacagatgcgtaaggagaaaataccgcatcagattggctattggccattgcatacgttgtatccatatcataatatgtacatttatattggctcatgtccaacattaccgccatgttgacattgattattgactagttattaatagtaatcaattacgggaacttccatagcccatatatggagttccgcgttacataacttacgggaatttccaaacctggctgaccgcccaacgacccccgcccattgacgtcaataatgacgtatgttcccatagtaacgccaatagggaacttccattgacgtcaatgggtggagtatttacggtaaactgcccacttgggaatttccaagtgtatcatatgccaagtacgccccctattgacgtcaatgacgggaacttccataagcttgcattatgcccagtacatgaccttatgggaatttcctacttggcagtacatctacgtattagtcatcgctattaccatggtgatgcggttttggcagtacatcaatgggcgtggatagcggtttgactcacgggaacttccaagtctccaccccattgacgtcaatgggagtttgttttgactcaccaaaatcaacgggaattcccaaaatgtcgtaacaactccgccccattgacgcaaatgggcggtaggcgtgtacggtgggaggtctatataagcagagctcgtttagtgaaccgtcagatcgcctggagacgccatccacgctgttttgacctccatagaagacaccgggaccgatccagcctccatcggctcgcatctctccttcacgcgcccgccgccctacctgaggccgccatccacgccggttgagtcgcgttctgccgcctcccgcctgtggtgcctcctgaactgcgtccgccgtctaggtaagtttaaagctcaggtcgagaccgggcctttgtccggcgctcccttggagcctacctagactcagccggctctccacgctttgcctgaccctgcttgctcaactctagttaacggtggagggcagtgtagtctgagcagtactcgttgctgccgcgcgcgccaccagacataatagctgacagactaacagactgttcctttccatgggtcttttctgcagtcaccgtcgtcgacacgtgtgatcagatatcgcggccgctctagagatatcgccaccatgaacacccagatcctggtgtttgccctggtggccagcattcctaccaacgccgacaagatctgtctgggacaccacgccgtgtctaatggcaccaaggtgaacaccctgaccgagaggggcgtggaagtggtgaatgccaccgagaccgtggagagaaccaacgtgcccaggatctgtagcaagggcaagagaaccgtggatctgggacagtgtggactgctgggcacaatcacaggacccccccagtgtgatcagttcctggagttcagcgccgatctgatcatcgagaggagagaaggcagcgatgtgtgctaccctggcaagttcgtgaatgaggaggccctgaggcagatcctgagagagagcggcggcatcgacaaggaaaccatgggcttcacctacagcggcatcagaaccaatggcaccacctccgcctgtagaagaagcggcagcagcttctacgccgagatgaagtggctgctgtccaacacagacaatgccgccttcccccagatgaccaagagctacaagaacaccagaaaggaccccgccctgatcatttggggcatccaccacagcggcagcacaacagagcagaccaagctgtacggcagcggcaataagctgatcacagtgggcagcagcaattaccagcagagcttcgtgccttctcctggagccagacctcaggtgaacggccagagcggcagaatcgatttccactggctgatcctgaaccccaacgacaccgtgaccttcagcttcaacggcgcctttatcgcccctgatagggcctctttcctgaggggcaagagcatgggcatccagtctgaagtgcaggtggacgccaattgtgagggcgattgctaccacagcgggggcaccatcatcagcaacctgcccttccagaacatcaacagcagagctgtgggcaagtgtcccagatacgtgaagcaggagtctctgctgctggccaccggcatgaagaatgtgcccgagatccctaagagaagaagaagaggcctgtttggagccatcgccggattcatcgagaatggctgggagggactgatcgatggctggtacggcttcagacaccagaatgcccagggagaaggaacagccgccgactacaagtctacacagagcgctattgaccagatcaccggcaagctgaacaggctgatcgagaaaaccaaccagcagtttgagctgatcgacaacgagttcaccgaggtggagagacagatcggcaacgtgatcaactggaccagggacagcatgaccgaagtgtggagctacaatgccgagctgctggtggccatggagaatcagcacaccatcgacctggccgacagcgagatgaataagctgtacgagcgggtgaagagacagctgagagagaacgccgaagaggacggcacaggctgcttcgagatcttccacaagtgtgacgacgactgtatggccagcatccggaacaacacctacgaccacagcaagtacagagaggaggccatccagaacagaatccagatcgaccccgtgaaactgagcagcggctacaaggatgtgatcctgtggttcagctttggcgccagctgctttatcctgctggccatcgccatgggcctggtgttcatctgtgtgaagaacggcaacatgaggtgtaccatctgtatctgatgaacacgtgggatccagatctgctgtgccttctagttgccagccatctgttgtttgcccctcccccgtgccttccttgaccctggaaggtgccactcccactgtcctttcctaataaaatgaggaaattgcatcgcattgtctgagtaggtgtcattctattctggggggtggggtggggcaggacagcaagggggaggattgggaagacaatagcaggcatgctggggatgcggtgggctctatgggtacccaggtgctgaagaattgacccggttcctcctgggccagaaagaagcaggcacatccccttctctgtgacacaccctgtccacgcccctggttcttagttccagccccactcataggacactcatagctcaggagggctccgccttcaatcccacccgctaaagtacttggagcggtctctccctccctcatcagcccaccaaaccaaacctagcctccaagagtgggaagaaattaaagcaagataggctattaagtgcagagggagagaaaatgcctccaacatgtgaggaagtaatgagagaaatcatagaattttaaggccatgatttaaggccatcatggccttaatcttccgcttcctcgctcactgactcgctgcgctcggtcgttcggctgcggcgagcggtatcagctcactcaaaggcggtaatacggttatccacagaatcaggggataacgcaggaaagaacatgtgagcaaaaggccagcaaaaggccaggaaccgtaaaaaggccgcgttgctggcgtttttccataggctccgcccccctgacgagcatcacaaaaatcgacgctcaagtcagaggtggcgaaacccgacaggactataaagataccaggcgtttccccctggaagctccctcgtgcgctctcctgttccgaccctgccgcttaccggatacctgtccgcctttctcccttcgggaagcgtggcgctttctcatagctcacgctgtaggtatctcagttcggtgtaggtcgttcgctccaagctgggctgtgtgcacgaaccccccgttcagcccgaccgctgcgccttatccggtaactatcgtcttgagtccaacccggtaagacacgacttatcgccactggcagcagccactggtaacaggattagcagagcgaggtatgtaggcggtgctacagagttcttgaagtggtggcctaactacggctacactagaagaacagtatttggtatctgcgctctgctgaagccagttaccttcggaaaaagagttggtagctcttgatccggcaaacaaaccaccgctggtagcggtggtttttttgtttgcaagcagcagattacgcgcagaaaaaaaggatctcaagaagatcctttgatcttttctacggggtctgacgctcagtggaacgaaaactcacgttaagggattttggtcatgagattatcaaaaaggatcttcacctagatccttttaaattaaaaatgaagttttaaatcaatctaaagtatatatgagtaaacttggtctgacagttaccaatgcttaatcagtgaggcacctatctcagcgatctgtctatttcgttcatccatagttgcctgactcggggggggggggcgctgaggtctgcctcgtgaagaaggtgttgctgactcataccaggcctgaatcgccccatcatccagccagaaagtgagggagccacggttgatgagagctttgttgtaggtggaccagttggtgattttgaacttttgctttgccacggaacggtctgcgttgtcgggaagatgcgtgatctgatccttcaactcagcaaaagttcgatttattcaacaaagccgccgtcccgtcaagtcagcgtaatgctctgccagtgttacaaccaattaaccaattctgattagaaaaactcatcgagcatcaaatgaaactgcaatttattcatatcaggattatcaataccatatttttgaaaaagccgtttctgtaatgaaggagaaaactcaccgaggcagttccataggatggcaagatcctggtatcggtctgcgattccgactcgtccaacatcaatacaacctattaatttcccctcgtcaaaaataaggttatcaagtgagaaatcaccatgagtgacgactgaatccggtgagaatggcaaaagcttatgcatttctttccagacttgttcaacaggccagccattacgctcgtcatcaaaatcactcgcatcaaccaaaccgttattcattcgtgattgcgcctgagcgagacgaaatacgcgatcgctgttaaaaggacaattacaaacaggaatcgaatgcaaccggcgcaggaacactgccagcgcatcaacaatattttcacctgaatcaggatattcttctaatacctggaatgctgttttcccggggatcgcagtggtgagtaaccatgcatcatcaggagtacggataaaatgcttgatggtcggaagaggcataaattccgtcagccagtttagtctgaccatctcatctgtaacatcattggcaacgctacctttgccatgtttcagaaacaactctggcgcatcgggcttcccatacaatcgatagattgtcgcacctgattgcccgacattatcgcgagcccatttatacccatataaatcagcatccatgttggaatttaatcgcggcctcgagcaagacgtttcccgttgaatatggctcataacaccccttgtattactgtttatgtaagcagacagttttattgttcatgatgatatatttttatcttgtgcaatgtaacatcagagattttgagacacaacgtggctttccccccccccccattattgaagcatttatcagggttattgtctcatgagcggatacatatttgaatgtatttagaaaaataaacaaataggggttccgcgcacatttccccgaaaagtgccacctgacgtctaagaaaccattattatcatgacattaacctataaaaataggcgtatcacgaggccctttcgtc

SEQ ID NO: 37 - DNA, 6111 bp, Artificial Sequence
  Plasmid DNA: 53334
tcgcgcgtttcggtgatgacggtgaaaacctctgacacatgcagctcccggagacggtcacagcttgtctgtaagcggatgccgggagcagacaagcccgtcagggcgcgtcagcgggtgttggcgggtgtcggggctggcttaactatgcggcatcagagcagattgtactgagagtgcaccatatgcggtgtgaaataccgcacagatgcgtaaggagaaaataccgcatcagattggctattggccattgcatacgttgtatccatatcataatatgtacatttatattggctcatgtccaacattaccgccatgttgacattgattattgactagttattaatagtaatcaattacgggaacttccatagcccatatatggagttccgcgttacataacttacgggaatttccaaacctggctgaccgcccaacgacccccgcccattgacgtcaataatgacgtatgttcccatagtaacgccaatagggaacttccattgacgtcaatgggtggagtatttacggtaaactgcccacttgggaatttccaagtgtatcatatgccaagtacgccccctattgacgtcaatgacgggaacttccataagcttgcattatgcccagtacatgaccttatgggaatttcctacttggcagtacatctacgtattagtcatcgctattaccatggtgatgcggttttggcagtacatcaatgggcgtggatagcggtttgactcacgggaacttccaagtctccaccccattgacgtcaatgggagtttgttttgactcaccaaaatcaacgggaattcccaaaatgtcgtaacaactccgccccattgacgcaaatgggcggtaggcgtgtacggtgggaggtctatataagcagagctcgtttagtgaaccgtcagatcgcctggagacgccatccacgctgttttgacctccatagaagacaccgggaccgatccagcctccatcggctcgcatctctccttcacgcgcccgccgccctacctgaggccgccatccacgccggttgagtcgcgttctgccgcctcccgcctgtggtgcctcctgaactgcgtccgccgtctaggtaagtttaaagctcaggtcgagaccgggcctttgtccggcgctcccttggagcctacctagactcagccggctctccacgctttgcctgaccctgcttgctcaactctagttaacggtggagggcagtgtagtctgagcagtactcgttgctgccgcgcgcgccaccagacataatagctgacagactaacagactgttcctttccatgggtcttttctgcagtcaccgtcgtcgacacgtgtgatcagatatcgcggccgctctagagatatcgccaccatgaacacccagatcctggtgtttgccctggtggccagcattcctaccaacgccgacaagatctgtctgggacaccacgccgtgtctaatggcaccaaggtgaacaccctgaccgagaggggcgtggaagtggtgaatgccaccgagaccgtggagagaaccaacgtgcccaggatctgtagcaagggcaagagaaccgtggatctgggacagtgtggactgctgggcacaatcacaggacccccccagtgtgatcagttcctggagttcagcgccgatctgatcatcgagaggagagaaggcagcgatgtgtgctaccctggcaagttcgtgaatgaggaggccctgaggcagatcctgagagagagcggcggcatcgacaaggaaaccatgggcttcacctacagcggcatcagaaccaatggcaccacctccgcctgtagaagaagcggcagcagcttctacgccgagatgaagtggctgctgtccaacacagacaatgccgccttcccccagatgaccaagagctacaagaacaccagaaaggaccccgccctgatcatttggggcatccaccacagcggcagcacaacagagcagaccaagctgtacggcagcggcaataagctgatcacagtgggcagcagcaattaccagcagagcttcgtgccttctcctggagccagacctcaggtgaacggccagagcggcagaatcgatttccactggctgatcctgaaccccaacgacaccgtgaccttcagcttcaacggcgcctttatcgcccctgatagggcctctttcctgaggggcaagagcatgggcatccagtctgaagtgcaggtggacgccaattgtgagggcgattgctaccacagcgggggcaccatcatcagcaacctgcccttccagaacatcaacagcagagctgtgggcaagtgtcccagatacgtgaagcaggagtctctgctgctggccaccggcatgaagaatgtgcccgagatccctcagagagagaccagaggcctgtttggagccatcgccggattcatcgagaatggctgggagggactgatcgatggctggtacggcttcagacaccagaatgcccagggagaaggaacagccgccgactacaagtctacacagagcgctattgaccagatcaccggcaagctgaacaggctgatcgagaaaaccaaccagcagtttgagctgatcgacaacgagttcaccgaggtggagagacagatcggcaacgtgatcaactggaccagggacagcatgaccgaagtgtggagctacaatgccgagctgctggtggccatggagaatcagcacaccatcgacctggccgacagcgagatgaataagctgtacgagcgggtgaagagacagctgagagagaacgccgaagaggacggcacaggctgcttcgagatcttccacaagtgtgacgacgactgtatggccagcatccggaacaacacctacgaccacagcaagtacagagaggaggccatccagaacagaatccagatcgacagcggcagactggtgcctagaggatctcctggcagcggatatattcctgaggcccctagagatggacaggcctatgtgagaaaggatggcgaatgggtgctgctgtctacatttctgggacaccaccatcaccaccattgatgaacacgtgggatccagatctgctgtgccttctagttgccagccatctgttgtttgcccctcccccgtgccttccttgaccctggaaggtgccactcccactgtcctttcctaataaaatgaggaaattgcatcgcattgtctgagtaggtgtcattctattctggggggtggggtggggcaggacagcaagggggaggattgggaagacaatagcaggcatgctggggatgcggtgggctctatgggtacccaggtgctgaagaattgacccggttcctcctgggccagaaagaagcaggcacatccccttctctgtgacacaccctgtccacgcccctggttcttagttccagccccactcataggacactcatagctcaggagggctccgccttcaatcccacccgctaaagtacttggagcggtctctccctccctcatcagcccaccaaaccaaacctagcctccaagagtgggaagaaattaaagcaagataggctattaagtgcagagggagagaaaatgcctccaacatgtgaggaagtaatgagagaaatcatagaattttaaggccatgatttaaggccatcatggccttaatcttccgcttcctcgctcactgactcgctgcgctcggtcgttcggctgcggcgagcggtatcagctcactcaaaggcggtaatacggttatccacagaatcaggggataacgcaggaaagaacatgtgagcaaaaggccagcaaaaggccaggaaccgtaaaaaggccgcgttgctggcgtttttccataggctccgcccccctgacgagcatcacaaaaatcgacgctcaagtcagaggtggcgaaacccgacaggactataaagataccaggcgtttccccctggaagctccctcgtgcgctctcctgttccgaccctgccgcttaccggatacctgtccgcctttctcccttcgggaagcgtggcgctttctcatagctcacgctgtaggtatctcagttcggtgtaggtcgttcgctccaagctgggctgtgtgcacgaaccccccgttcagcccgaccgctgcgccttatccggtaactatcgtcttgagtccaacccggtaagacacgacttatcgccactggcagcagccactggtaacaggattagcagagcgaggtatgtaggcggtgctacagagttcttgaagtggtggcctaactacggctacactagaagaacagtatttggtatctgcgctctgctgaagccagttaccttcggaaaaagagttggtagctcttgatccggcaaacaaaccaccgctggtagcggtggtttttttgtttgcaagcagcagattacgcgcagaaaaaaaggatctcaagaagatcctttgatcttttctacggggtctgacgctcagtggaacgaaaactcacgttaagggattttggtcatgagattatcaaaaaggatcttcacctagatccttttaaattaaaaatgaagttttaaatcaatctaaagtatatatgagtaaacttggtctgacagttaccaatgcttaatcagtgaggcacctatctcagcgatctgtctatttcgttcatccatagttgcctgactcggggggggggggcgctgaggtctgcctcgtgaagaaggtgttgctgactcataccaggcctgaatcgccccatcatccagccagaaagtgagggagccacggttgatgagagctttgttgtaggtggaccagttggtgattttgaacttttgctttgccacggaacggtctgcgttgtcgggaagatgcgtgatctgatccttcaactcagcaaaagttcgatttattcaacaaagccgccgtcccgtcaagtcagcgtaatgctctgccagtgttacaaccaattaaccaattctgattagaaaaactcatcgagcatcaaatgaaactgcaatttattcatatcaggattatcaataccatatttttgaaaaagccgtttctgtaatgaaggagaaaactcaccgaggcagttccataggatggcaagatcctggtatcggtctgcgattccgactcgtccaacatcaatacaacctattaatttcccctcgtcaaaaataaggttatcaagtgagaaatcaccatgagtgacgactgaatccggtgagaatggcaaaagcttatgcatttctttccagacttgttcaacaggccagccattacgctcgtcatcaaaatcactcgcatcaaccaaaccgttattcattcgtgattgcgcctgagcgagacgaaatacgcgatcgctgttaaaaggacaattacaaacaggaatcgaatgcaaccggcgcaggaacactgccagcgcatcaacaatattttcacctgaatcaggatattcttctaatacctggaatgctgttttcccggggatcgcagtggtgagtaaccatgcatcatcaggagtacggataaaatgcttgatggtcggaagaggcataaattccgtcagccagtttagtctgaccatctcatctgtaacatcattggcaacgctacctttgccatgtttcagaaacaactctggcgcatcgggcttcccatacaatcgatagattgtcgcacctgattgcccgacattatcgcgagcccatttatacccatataaatcagcatccatgttggaatttaatcgcggcctcgagcaagacgtttcccgttgaatatggctcataacaccccttgtattactgtttatgtaagcagacagttttattgttcatgatgatatatttttatcttgtgcaatgtaacatcagagattttgagacacaacgtggctttccccccccccccattattgaagcatttatcagggttattgtctcatgagcggatacatatttgaatgtatttagaaaaataaacaaataggggttccgcgcacatttccccgaaaagtgccacctgacgtctaagaaaccattattatcatgacattaacctataaaaataggcgtatcacgaggccctttcgtc

SEQ ID NO: 38 - DNA, 6126 bp, Artificial Sequence
  Plasmid DNA: 53335 (8x)
tcgcgcgtttcggtgatgacggtgaaaacctctgacacatgcagctcccggagacggtcacagcttgtctgtaagcggatgccgggagcagacaagcccgtcagggcgcgtcagcgggtgttggcgggtgtcggggctggcttaactatgcggcatcagagcagattgtactgagagtgcaccatatgcggtgtgaaataccgcacagatgcgtaaggagaaaataccgcatcagattggctattggccattgcatacgttgtatccatatcataatatgtacatttatattggctcatgtccaacattaccgccatgttgacattgattattgactagttattaatagtaatcaattacgggaacttccatagcccatatatggagttccgcgttacataacttacgggaatttccaaacctggctgaccgcccaacgacccccgcccattgacgtcaataatgacgtatgttcccatagtaacgccaatagggaacttccattgacgtcaatgggtggagtatttacggtaaactgcccacttgggaatttccaagtgtatcatatgccaagtacgccccctattgacgtcaatgacgggaacttccataagcttgcattatgcccagtacatgaccttatgggaatttcctacttggcagtacatctacgtattagtcatcgctattaccatggtgatgcggttttggcagtacatcaatgggcgtggatagcggtttgactcacgggaacttccaagtctccaccccattgacgtcaatgggagtttgttttgactcaccaaaatcaacgggaattcccaaaatgtcgtaacaactccgccccattgacgcaaatgggcggtaggcgtgtacggtgggaggtctatataagcagagctcgtttagtgaaccgtcagatcgcctggagacgccatccacgctgttttgacctccatagaagacaccgggaccgatccagcctccatcggctcgcatctctccttcacgcgcccgccgccctacctgaggccgccatccacgccggttgagtcgcgttctgccgcctcccgcctgtggtgcctcctgaactgcgtccgccgtctaggtaagtttaaagctcaggtcgagaccgggcctttgtccggcgctcccttggagcctacctagactcagccggctctccacgctttgcctgaccctgcttgctcaactctagttaacggtggagggcagtgtagtctgagcagtactcgttgctgccgcgcgcgccaccagacataatagctgacagactaacagactgttcctttccatgggtcttttctgcagtcaccgtcgtcgacacgtgtgatcagatatcgcggccgctctagagatatcgccaccatgaaaaccatcatcgccctgagctacatcctgtgcctggtgttcagccagaagctgcccggcaacgataatagcaccgccacactgtgtctgggacaccacgccgtgcctaatggcaccatcgtgaaaacaatcaccaacgaccagatcgaggtgaccaatgccacagagctggtgcagtctagcagcacaggcggcatctgtgatagccctcaccagatcctggatggcgagaactgtaccctgatcgatgccctgctgggagatcctcagtgtgacggcttccagaacaaaaagtgggacctgttcgtggagagaagcaaggcctacagcaactgctacccctacgacgtgcctgattacgccagcctgagatctctggtggcctcttctggcaccctggagttcaacaacgagagcttcaactgggccggagtgacacagaatggcaccagcagcgcctgtaagcggagaagcaacaagagcttcttcagcaggctgaactggctgacccacctgaagtacaagtaccccgccctgaatgtgaccatgcccaacaatgagaagttcgacaagctgtacatctggggagtgcaccaccctgtgaccgatagcgatcagatcagcctgtatgcccaggccagcggaagaatcacagtgagcaccaagagaagccagcagaccgtgatccccaacatcggctacagacccagagtgagggacatcagcagccggatcagcatctactggacaatcgtgaagcctggcgacatcctgctgatcaacagcaccggcaatctgattgcccccaggggctacttcaagatcaggagcggcaagagcagcatcatgagaagcgatgcccctatcggcaagtgtaacagcgagtgtatcacccccaatggcagcatccccaacgacaagcccttccagaacgtgaaccggatcacctatggcgcctgccctagatacgtgaagcagaacaccctgaagctggccaccggcatgagaaatgtgcccgagaagcagaccagaggcatctttggagccatcgccggattcatcgagaatggctgggagggaatggtggatggctggtacggcttcagacaccagaatagcgagggaacaggacaggccgccgatctgaaatctacacaggccgccatcaaccagatcaacggcaagctgaacaggctgatcggcaagaccaacgagaagttccaccagatcgaaaaggaattcagcgaggtggagggcagaatccaggacctggagaagtacgtggaggacaccaagatcgacctgtggagctacaatgccgaactgctggtggccctggagaatcagcacaccatcgacctgaccgacagcgagatgaacaagctgttcgagcggaccaagaagcagctgcgcgagaacgccgaggatatgggcaatggctgctttaagatctaccacaagtgtgacaacgcctgtatcgagagcatccggaacggcacctacgatcacgacgtgtacagagatgaggccctgaacaaccggtttcagatcaagggcgtggagctgaagagcggctacaaggactggattctgtggatcagcttcgccatcagctgctttctgctgtgtgtggccctgctgggctttattatgtgggcctgccagaagggcaacatccgctgtaacatctgtatctgatgaacacgtgggatccagatctgctgtgccttctagttgccagccatctgttgtttgcccctcccccgtgccttccttgaccctggaaggtgccactcccactgtcctttcctaataaaatgaggaaattgcatcgcattgtctgagtaggtgtcattctattctggggggtggggtggggcaggacagcaagggggaggattgggaagacaatagcaggcatgctggggatgcggtgggctctatgggtacccaggtgctgaagaattgacccggttcctcctgggccagaaagaagcaggcacatccccttctctgtgacacaccctgtccacgcccctggttcttagttccagccccactcataggacactcatagctcaggagggctccgccttcaatcccacccgctaaagtacttggagcggtctctccctccctcatcagcccaccaaaccaaacctagcctccaagagtgggaagaaattaaagcaagataggctattaagtgcagagggagagaaaatgcctccaacatgtgaggaagtaatgagagaaatcatagaattttaaggccatgatttaaggccatcatggccttaatcttccgcttcctcgctcactgactcgctgcgctcggtcgttcggctgcggcgagcggtatcagctcactcaaaggcggtaatacggttatccacagaatcaggggataacgcaggaaagaacatgtgagcaaaaggccagcaaaaggccaggaaccgtaaaaaggccgcgttgctggcgtttttccataggctccgcccccctgacgagcatcacaaaaatcgacgctcaagtcagaggtggcgaaacccgacaggactataaagataccaggcgtttccccctggaagctccctcgtgcgctctcctgttccgaccctgccgcttaccggatacctgtccgcctttctcccttcgggaagcgtggcgctttctcatagctcacgctgtaggtatctcagttcggtgtaggtcgttcgctccaagctgggctgtgtgcacgaaccccccgttcagcccgaccgctgcgccttatccggtaactatcgtcttgagtccaacccggtaagacacgacttatcgccactggcagcagccactggtaacaggattagcagagcgaggtatgtaggcggtgctacagagttcttgaagtggtggcctaactacggctacactagaagaacagtatttggtatctgcgctctgctgaagccagttaccttcggaaaaagagttggtagctcttgatccggcaaacaaaccaccgctggtagcggtggtttttttgtttgcaagcagcagattacgcgcagaaaaaaaggatctcaagaagatcctttgatcttttctacggggtctgacgctcagtggaacgaaaactcacgttaagggattttggtcatgagattatcaaaaaggatcttcacctagatccttttaaattaaaaatgaagttttaaatcaatctaaagtatatatgagtaaacttggtctgacagttaccaatgcttaatcagtgaggcacctatctcagcgatctgtctatttcgttcatccatagttgcctgactcggggggggggggcgctgaggtctgcctcgtgaagaaggtgttgctgactcataccaggcctgaatcgccccatcatccagccagaaagtgagggagccacggttgatgagagctttgttgtaggtggaccagttggtgattttgaacttttgctttgccacggaacggtctgcgttgtcgggaagatgcgtgatctgatccttcaactcagcaaaagttcgatttattcaacaaagccgccgtcccgtcaagtcagcgtaatgctctgccagtgttacaaccaattaaccaattctgattagaaaaactcatcgagcatcaaatgaaactgcaatttattcatatcaggattatcaataccatatttttgaaaaagccgtttctgtaatgaaggagaaaactcaccgaggcagttccataggatggcaagatcctggtatcggtctgcgattccgactcgtccaacatcaatacaacctattaatttcccctcgtcaaaaataaggttatcaagtgagaaatcaccatgagtgacgactgaatccggtgagaatggcaaaagcttatgcatttctttccagacttgttcaacaggccagccattacgctcgtcatcaaaatcactcgcatcaaccaaaccgttattcattcgtgattgcgcctgagcgagacgaaatacgcgatcgctgttaaaaggacaattacaaacaggaatcgaatgcaaccggcgcaggaacactgccagcgcatcaacaatattttcacctgaatcaggatattcttctaatacctggaatgctgttttcccggggatcgcagtggtgagtaaccatgcatcatcaggagtacggataaaatgcttgatggtcggaagaggcataaattccgtcagccagtttagtctgaccatctcatctgtaacatcattggcaacgctacctttgccatgtttcagaaacaactctggcgcatcgggcttcccatacaatcgatagattgtcgcacctgattgcccgacattatcgcgagcccatttatacccatataaatcagcatccatgttggaatttaatcgcggcctcgagcaagacgtttcccgttgaatatggctcataacaccccttgtattactgtttatgtaagcagacagttttattgttcatgatgatatatttttatcttgtgcaatgtaacatcagagattttgagacacaacgtggctttccccccccccccattattgaagcatttatcagggttattgtctcatgagcggatacatatttgaatgtatttagaaaaataaacaaataggggttccgcgcacatttccccgaaaagtgccacctgacgtctaagaaaccattattatcatgacattaacctataaaaataggcgtatcacgaggccctttcgtc

SEQ ID NO: 39 - DNA, 6126 bp, Artificial Sequence
  Plasmid DNA: 53336 (8x)
tcgcgcgtttcggtgatgacggtgaaaacctctgacacatgcagctcccggagacggtcacagcttgtctgtaagcggatgccgggagcagacaagcccgtcagggcgcgtcagcgggtgttggcgggtgtcggggctggcttaactatgcggcatcagagcagattgtactgagagtgcaccatatgcggtgtgaaataccgcacagatgcgtaaggagaaaataccgcatcagattggctattggccattgcatacgttgtatccatatcataatatgtacatttatattggctcatgtccaacattaccgccatgttgacattgattattgactagttattaatagtaatcaattacgggaacttccatagcccatatatggagttccgcgttacataacttacgggaatttccaaacctggctgaccgcccaacgacccccgcccattgacgtcaataatgacgtatgttcccatagtaacgccaatagggaacttccattgacgtcaatgggtggagtatttacggtaaactgcccacttgggaatttccaagtgtatcatatgccaagtacgccccctattgacgtcaatgacgggaacttccataagcttgcattatgcccagtacatgaccttatgggaatttcctacttggcagtacatctacgtattagtcatcgctattaccatggtgatgcggttttggcagtacatcaatgggcgtggatagcggtttgactcacgggaacttccaagtctccaccccattgacgtcaatgggagtttgttttgactcaccaaaatcaacgggaattcccaaaatgtcgtaacaactccgccccattgacgcaaatgggcggtaggcgtgtacggtgggaggtctatataagcagagctcgtttagtgaaccgtcagatcgcctggagacgccatccacgctgttttgacctccatagaagacaccgggaccgatccagcctccatcggctcgcatctctccttcacgcgcccgccgccctacctgaggccgccatccacgccggttgagtcgcgttctgccgcctcccgcctgtggtgcctcctgaactgcgtccgccgtctaggtaagtttaaagctcaggtcgagaccgggcctttgtccggcgctcccttggagcctacctagactcagccggctctccacgctttgcctgaccctgcttgctcaactctagttaacggtggagggcagtgtagtctgagcagtactcgttgctgccgcgcgcgccaccagacataatagctgacagactaacagactgttcctttccatgggtcttttctgcagtcaccgtcgtcgacacgtgtgatcagatatcgcggccgctctagagatatcgccaccatgaaaaccatcatcgccctgagctacatcctgtgcctggtgttcagccagaagctgcccggcaacgataatagcaccgccacactgtgtctgggacaccacgccgtgcctaatggcaccatcgtgaaaacaatcaccaacgaccagatcgaggtgaccaatgccacagagctggtgcagtctagcagcacaggcggcatctgtgatagccctcaccagatcctggatggcgagaactgtaccctgatcgatgccctgctgggagatcctcagtgtgacggcttccagaacaaaaagtgggacctgttcgtggagagaagcaaggcctacagcaactgctacccctacgacgtgcctgattacgccagcctgagatctctggtggcctcttctggcaccctggagttcaacaacgagagcttcaactgggccggagtgacacagaatggcaccagcagcgcctgtaagcggagaagcaacaagagcttcttcagcaggctgaactggctgacccacctgaagtacaagtaccccgccctgaatgtgaccatgcccaacaatgagaagttcgacaagctgtacatctggggagtgcaccaccctgtgaccgatagcgatcagatcagcctgtatgcccaggccagcggaagaatcacagtgagcaccaagagaagccagcagaccgtgatccccaacatcggctacagacccagagtgagggacatcagcagccggatcagcatctactggacaatcgtgaagcctggcgacatcctgctgatcaacagcaccggcaatctgattgcccccaggggctacttcaagatcaggagcggcaagagcagcatcatgagaagcgatgcccctatcggcaagtgtaacagcgagtgtatcacccccaatggcagcatccccaacgacaagcccttccagaacgtgaaccggatcacctatggcgcctgccctagatacgtgaagcagaacaccctgaagctggccaccggcatgagaaatgtgccccagagagagaccagaggcatctttggagccatcgccggattcatcgagaatggctgggagggaatggtggatggctggtacggcttcagacaccagaatagcgagggaacaggacaggccgccgatctgaaatctacacaggccgccatcaaccagatcaacggcaagctgaacaggctgatcggcaagaccaacgagaagttccaccagatcgaaaaggaattcagcgaggtggagggcagaatccaggacctggagaagtacgtggaggacaccaagatcgacctgtggagctacaatgccgaactgctggtggccctggagaatcagcacaccatcgacctgaccgacagcgagatgaacaagctgttcgagcggaccaagaagcagctgcgcgagaacgccgaggatatgggcaatggctgctttaagatctaccacaagtgtgacaacgcctgtatcgagagcatccggaacggcacctacgatcacgacgtgtacagagatgaggccctgaacaaccggtttcagatcaagggcgtggagctgaagagcggctacaaggactggattctgtggatcagcttcgccatcagctgctttctgctgtgtgtggccctgctgggctttattatgtgggcctgccagaagggcaacatccgctgtaacatctgtatctgatgaacacgtgggatccagatctgctgtgccttctagttgccagccatctgttgtttgcccctcccccgtgccttccttgaccctggaaggtgccactcccactgtcctttcctaataaaatgaggaaattgcatcgcattgtctgagtaggtgtcattctattctggggggtggggtggggcaggacagcaagggggaggattgggaagacaatagcaggcatgctggggatgcggtgggctctatgggtacccaggtgctgaagaattgacccggttcctcctgggccagaaagaagcaggcacatccccttctctgtgacacaccctgtccacgcccctggttcttagttccagccccactcataggacactcatagctcaggagggctccgccttcaatcccacccgctaaagtacttggagcggtctctccctccctcatcagcccaccaaaccaaacctagcctccaagagtgggaagaaattaaagcaagataggctattaagtgcagagggagagaaaatgcctccaacatgtgaggaagtaatgagagaaatcatagaattttaaggccatgatttaaggccatcatggccttaatcttccgcttcctcgctcactgactcgctgcgctcggtcgttcggctgcggcgagcggtatcagctcactcaaaggcggtaatacggttatccacagaatcaggggataacgcaggaaagaacatgtgagcaaaaggccagcaaaaggccaggaaccgtaaaaaggccgcgttgctggcgtttttccataggctccgcccccctgacgagcatcacaaaaatcgacgctcaagtcagaggtggcgaaacccgacaggactataaagataccaggcgtttccccctggaagctccctcgtgcgctctcctgttccgaccctgccgcttaccggatacctgtccgcctttctcccttcgggaagcgtggcgctttctcatagctcacgctgtaggtatctcagttcggtgtaggtcgttcgctccaagctgggctgtgtgcacgaaccccccgttcagcccgaccgctgcgccttatccggtaactatcgtcttgagtccaacccggtaagacacgacttatcgccactggcagcagccactggtaacaggattagcagagcgaggtatgtaggcggtgctacagagttcttgaagtggtggcctaactacggctacactagaagaacagtatttggtatctgcgctctgctgaagccagttaccttcggaaaaagagttggtagctcttgatccggcaaacaaaccaccgctggtagcggtggtttttttgtttgcaagcagcagattacgcgcagaaaaaaaggatctcaagaagatcctttgatcttttctacggggtctgacgctcagtggaacgaaaactcacgttaagggattttggtcatgagattatcaaaaaggatcttcacctagatccttttaaattaaaaatgaagttttaaatcaatctaaagtatatatgagtaaacttggtctgacagttaccaatgcttaatcagtgaggcacctatctcagcgatctgtctatttcgttcatccatagttgcctgactcggggggggggggcgctgaggtctgcctcgtgaagaaggtgttgctgactcataccaggcctgaatcgccccatcatccagccagaaagtgagggagccacggttgatgagagctttgttgtaggtggaccagttggtgattttgaacttttgctttgccacggaacggtctgcgttgtcgggaagatgcgtgatctgatccttcaactcagcaaaagttcgatttattcaacaaagccgccgtcccgtcaagtcagcgtaatgctctgccagtgttacaaccaattaaccaattctgattagaaaaactcatcgagcatcaaatgaaactgcaatttattcatatcaggattatcaataccatatttttgaaaaagccgtttctgtaatgaaggagaaaactcaccgaggcagttccataggatggcaagatcctggtatcggtctgcgattccgactcgtccaacatcaatacaacctattaatttcccctcgtcaaaaataaggttatcaagtgagaaatcaccatgagtgacgactgaatccggtgagaatggcaaaagcttatgcatttctttccagacttgttcaacaggccagccattacgctcgtcatcaaaatcactcgcatcaaccaaaccgttattcattcgtgattgcgcctgagcgagacgaaatacgcgatcgctgttaaaaggacaattacaaacaggaatcgaatgcaaccggcgcaggaacactgccagcgcatcaacaatattttcacctgaatcaggatattcttctaatacctggaatgctgttttcccggggatcgcagtggtgagtaaccatgcatcatcaggagtacggataaaatgcttgatggtcggaagaggcataaattccgtcagccagtttagtctgaccatctcatctgtaacatcattggcaacgctacctttgccatgtttcagaaacaactctggcgcatcgggcttcccatacaatcgatagattgtcgcacctgattgcccgacattatcgcgagcccatttatacccatataaatcagcatccatgttggaatttaatcgcggcctcgagcaagacgtttcccgttgaatatggctcataacaccccttgtattactgtttatgtaagcagacagttttattgttcatgatgatatatttttatcttgtgcaatgtaacatcagagattttgagacacaacgtggctttccccccccccccattattgaagcatttatcagggttattgtctcatgagcggatacatatttgaatgtatttagaaaaataaacaaataggggttccgcgcacatttccccgaaaagtgccacctgacgtctaagaaaccattattatcatgacattaacctataaaaataggcgtatcacgaggccctttcgtc

SEQ ID NO: 40 - DNA, 6120 bp, Artificial Sequence
  Plasmid DNA: 53337 (8x)
tcgcgcgtttcggtgatgacggtgaaaacctctgacacatgcagctcccggagacggtcacagcttgtctgtaagcggatgccgggagcagacaagcccgtcagggcgcgtcagcgggtgttggcgggtgtcggggctggcttaactatgcggcatcagagcagattgtactgagagtgcaccatatgcggtgtgaaataccgcacagatgcgtaaggagaaaataccgcatcagattggctattggccattgcatacgttgtatccatatcataatatgtacatttatattggctcatgtccaacattaccgccatgttgacattgattattgactagttattaatagtaatcaattacgggaacttccatagcccatatatggagttccgcgttacataacttacgggaatttccaaacctggctgaccgcccaacgacccccgcccattgacgtcaataatgacgtatgttcccatagtaacgccaatagggaacttccattgacgtcaatgggtggagtatttacggtaaactgcccacttgggaatttccaagtgtatcatatgccaagtacgccccctattgacgtcaatgacgggaacttccataagcttgcattatgcccagtacatgaccttatgggaatttcctacttggcagtacatctacgtattagtcatcgctattaccatggtgatgcggttttggcagtacatcaatgggcgtggatagcggtttgactcacgggaacttccaagtctccaccccattgacgtcaatgggagtttgttttgactcaccaaaatcaacgggaattcccaaaatgtcgtaacaactccgccccattgacgcaaatgggcggtaggcgtgtacggtgggaggtctatataagcagagctcgtttagtgaaccgtcagatcgcctggagacgccatccacgctgttttgacctccatagaagacaccgggaccgatccagcctccatcggctcgcatctctccttcacgcgcccgccgccctacctgaggccgccatccacgccggttgagtcgcgttctgccgcctcccgcctgtggtgcctcctgaactgcgtccgccgtctaggtaagtttaaagctcaggtcgagaccgggcctttgtccggcgctcccttggagcctacctagactcagccggctctccacgctttgcctgaccctgcttgctcaactctagttaacggtggagggcagtgtagtctgagcagtactcgttgctgccgcgcgcgccaccagacataatagctgacagactaacagactgttcctttccatgggtcttttctgcagtcaccgtcgtcgacacgtgtgatcagatatcgcggccgctctagagatatcgccaccatgaaaaccatcatcgccctgagctacatcctgtgcctggtgttcagccagaagctgcccggcaacgataatagcaccgccacactgtgtctgggacaccacgccgtgcctaatggcaccatcgtgaaaacaatcaccaacgaccagatcgaggtgaccaatgccacagagctggtgcagtctagcagcacaggcggcatctgtgatagccctcaccagatcctggatggcgagaactgtaccctgatcgatgccctgctgggagatcctcagtgtgacggcttccagaacaaaaagtgggacctgttcgtggagagaagcaaggcctacagcaactgctacccctacgacgtgcctgattacgccagcctgagatctctggtggcctcttctggcaccctggagttcaacaacgagagcttcaactgggccggagtgacacagaatggcaccagcagcgcctgtaagcggagaagcaacaagagcttcttcagcaggctgaactggctgacccacctgaagtacaagtaccccgccctgaatgtgaccatgcccaacaatgagaagttcgacaagctgtacatctggggagtgcaccaccctgtgaccgatagcgatcagatcagcctgtatgcccaggccagcggaagaatcacagtgagcaccaagagaagccagcagaccgtgatccccaacatcggctacagacccagagtgagggacatcagcagccggatcagcatctactggacaatcgtgaagcctggcgacatcctgctgatcaacagcaccggcaatctgattgcccccaggggctacttcaagatcaggagcggcaagagcagcatcatgagaagcgatgcccctatcggcaagtgtaacagcgagtgtatcacccccaatggcagcatccccaacgacaagcccttccagaacgtgaaccggatcacctatggcgcctgccctagatacgtgaagcagaacaccctgaagctggccaccggcatgagaaatgtgccccagagagagaccagaggcatctttggagccatcgccggattcatcgagaatggctgggagggaatggtggatggctggtacggcttcagacaccagaatagcgagggaacaggacaggccgccgatctgaaatctacacaggccgccatcaaccagatcaacggcaagctgaacaggctgatcggcaagaccaacgagaagttccaccagatcgaaaaggaattcagcgaggtggagggcagaatccaggacctggagaagtacgtggaggacaccaagatcgacctgtggagctacaatgccgaactgctggtggccctggagaatcagcacaccatcgacctgaccgacagcgagatgaacaagctgttcgagcggaccaagaagcagctgcgcgagaacgccgaggatatgggcaatggctgctttaagatctaccacaagtgtgacaacgcctgtatcgagagcatccggaacggcacctacgatcacgacgtgtacagagatgaggccctgaacaaccggtttcagatcagcggcagactggtgcctagaggatctcctggcagcggatatattcctgaggcccctagagatggacaggcctatgtgagaaaggatggcgaatgggtgctgctgtctacatttctgggacaccaccatcaccaccattgatgaacacgtgggatccagatctgctgtgccttctagttgccagccatctgttgtttgcccctcccccgtgccttccttgaccctggaaggtgccactcccactgtcctttcctaataaaatgaggaaattgcatcgcattgtctgagtaggtgtcattctattctggggggtggggtggggcaggacagcaagggggaggattgggaagacaatagcaggcatgctggggatgcggtgggctctatgggtacccaggtgctgaagaattgacccggttcctcctgggccagaaagaagcaggcacatccccttctctgtgacacaccctgtccacgcccctggttcttagttccagccccactcataggacactcatagctcaggagggctccgccttcaatcccacccgctaaagtacttggagcggtctctccctccctcatcagcccaccaaaccaaacctagcctccaagagtgggaagaaattaaagcaagataggctattaagtgcagagggagagaaaatgcctccaacatgtgaggaagtaatgagagaaatcatagaattttaaggccatgatttaaggccatcatggccttaatcttccgcttcctcgctcactgactcgctgcgctcggtcgttcggctgcggcgagcggtatcagctcactcaaaggcggtaatacggttatccacagaatcaggggataacgcaggaaagaacatgtgagcaaaaggccagcaaaaggccaggaaccgtaaaaaggccgcgttgctggcgtttttccataggctccgcccccctgacgagcatcacaaaaatcgacgctcaagtcagaggtggcgaaacccgacaggactataaagataccaggcgtttccccctggaagctccctcgtgcgctctcctgttccgaccctgccgcttaccggatacctgtccgcctttctcccttcgggaagcgtggcgctttctcatagctcacgctgtaggtatctcagttcggtgtaggtcgttcgctccaagctgggctgtgtgcacgaaccccccgttcagcccgaccgctgcgccttatccggtaactatcgtcttgagtccaacccggtaagacacgacttatcgccactggcagcagccactggtaacaggattagcagagcgaggtatgtaggcggtgctacagagttcttgaagtggtggcctaactacggctacactagaagaacagtatttggtatctgcgctctgctgaagccagttaccttcggaaaaagagttggtagctcttgatccggcaaacaaaccaccgctggtagcggtggtttttttgtttgcaagcagcagattacgcgcagaaaaaaaggatctcaagaagatcctttgatcttttctacggggtctgacgctcagtggaacgaaaactcacgttaagggattttggtcatgagattatcaaaaaggatcttcacctagatccttttaaattaaaaatgaagttttaaatcaatctaaagtatatatgagtaaacttggtctgacagttaccaatgcttaatcagtgaggcacctatctcagcgatctgtctatttcgttcatccatagttgcctgactcggggggggggggcgctgaggtctgcctcgtgaagaaggtgttgctgactcataccaggcctgaatcgccccatcatccagccagaaagtgagggagccacggttgatgagagctttgttgtaggtggaccagttggtgattttgaacttttgctttgccacggaacggtctgcgttgtcgggaagatgcgtgatctgatccttcaactcagcaaaagttcgatttattcaacaaagccgccgtcccgtcaagtcagcgtaatgctctgccagtgttacaaccaattaaccaattctgattagaaaaactcatcgagcatcaaatgaaactgcaatttattcatatcaggattatcaataccatatttttgaaaaagccgtttctgtaatgaaggagaaaactcaccgaggcagttccataggatggcaagatcctggtatcggtctgcgattccgactcgtccaacatcaatacaacctattaatttcccctcgtcaaaaataaggttatcaagtgagaaatcaccatgagtgacgactgaatccggtgagaatggcaaaagcttatgcatttctttccagacttgttcaacaggccagccattacgctcgtcatcaaaatcactcgcatcaaccaaaccgttattcattcgtgattgcgcctgagcgagacgaaatacgcgatcgctgttaaaaggacaattacaaacaggaatcgaatgcaaccggcgcaggaacactgccagcgcatcaacaatattttcacctgaatcaggatattcttctaatacctggaatgctgttttcccggggatcgcagtggtgagtaaccatgcatcatcaggagtacggataaaatgcttgatggtcggaagaggcataaattccgtcagccagtttagtctgaccatctcatctgtaacatcattggcaacgctacctttgccatgtttcagaaacaactctggcgcatcgggcttcccatacaatcgatagattgtcgcacctgattgcccgacattatcgcgagcccatttatacccatataaatcagcatccatgttggaatttaatcgcggcctcgagcaagacgtttcccgttgaatatggctcataacaccccttgtattactgtttatgtaagcagacagttttattgttcatgatgatatatttttatcttgtgcaatgtaacatcagagattttgagacacaacgtggctttccccccccccccattattgaagcatttatcagggttattgtctcatgagcggatacatatttgaatgtatttagaaaaataaacaaataggggttccgcgcacatttccccgaaaagtgccacctgacgtctaagaaaccattattatcatgacattaacctataaaaataggcgtatcacgaggccctttcgtc

SEQ ID NO: 41 - DNA, 6123 bp, Artificial Sequence
  Plasmid DNA: 53338
tcgcgcgtttcggtgatgacggtgaaaacctctgacacatgcagctcccggagacggtcacagcttgtctgtaagcggatgccgggagcagacaagcccgtcagggcgcgtcagcgggtgttggcgggtgtcggggctggcttaactatgcggcatcagagcagattgtactgagagtgcaccatatgcggtgtgaaataccgcacagatgcgtaaggagaaaataccgcatcagattggctattggccattgcatacgttgtatccatatcataatatgtacatttatattggctcatgtccaacattaccgccatgttgacattgattattgactagttattaatagtaatcaattacgggaacttccatagcccatatatggagttccgcgttacataacttacgggaatttccaaacctggctgaccgcccaacgacccccgcccattgacgtcaataatgacgtatgttcccatagtaacgccaatagggaacttccattgacgtcaatgggtggagtatttacggtaaactgcccacttgggaatttccaagtgtatcatatgccaagtacgccccctattgacgtcaatgacgggaacttccataagcttgcattatgcccagtacatgaccttatgggaatttcctacttggcagtacatctacgtattagtcatcgctattaccatggtgatgcggttttggcagtacatcaatgggcgtggatagcggtttgactcacgggaacttccaagtctccaccccattgacgtcaatgggagtttgttttgactcaccaaaatcaacgggaattcccaaaatgtcgtaacaactccgccccattgacgcaaatgggcggtaggcgtgtacggtgggaggtctatataagcagagctcgtttagtgaaccgtcagatcgcctggagacgccatccacgctgttttgacctccatagaagacaccgggaccgatccagcctccatcggctcgcatctctccttcacgcgcccgccgccctacctgaggccgccatccacgccggttgagtcgcgttctgccgcctcccgcctgtggtgcctcctgaactgcgtccgccgtctaggtaagtttaaagctcaggtcgagaccgggcctttgtccggcgctcccttggagcctacctagactcagccggctctccacgctttgcctgaccctgcttgctcaactctagttaacggtggagggcagtgtagtctgagcagtactcgttgctgccgcgcgcgccaccagacataatagctgacagactaacagactgttcctttccatgggtcttttctgcagtcaccgtcgtcgacacgtgtgatcagatatcgcggccgctctagagatatcgccaccatggacatccctgtgatcgcctttctgatcctgaccagcacatgtgtgcaggccgacagaatctgtgtgggctacctgagcaccaatagcagcgagagagtggataccctgctggagaacaacgtgcctgtgaccagctctgtggatctggtggagaccaatcacaccggcacctactgtagcctgggcggcatttctcctgtgcacctgggcgattgttctttcgagggctggattgtgggaaatcctgcctgtgccagcaatctgggcatcagggagtggagctacctgatcgaagatccttctgcccctcacggcctgtgttatcctggcgagctggacaataacggcgagctgaggcacctgtttagcggcatccggagctttagcaggacagagctgatcgcccctacatcttggggagccgtgaatgatggagtgagcagcgcctgtcaggataagggcgccagcagcttctacagaaacctggtgtggttcgtggagaggggcaacaagtaccctgtgatccggggcacctacaataataccaccggcagggacgtgctggtgatctggggaattcaccaccctgtgagcacagatgaggccagaaagctgtacgtgaacgacaacccctacaccctggtgtctacaagcagctggagccggaagtacaatctggagatcggcatcagacctggctacaacggccagaaaagctggatgaagatctactggtatctgatgcaccctggcgagagcatcagcttcgagagcaatggaggactgctggcccctaagtacggctacatcatcgaggagtacggcaagggcagaatcttccagagccggatcagaatcgccaagtgtaacaccaagtgccagacatctgtgggcggcatcaacaccaacaagaccttccagaacatcgagagaaacgccctgggagactgccctaagtacatcaagagcggccagctgaaactggccaccggcctgagaaatgtgcctgccatcagcaagagaggactgtttggagccatcgccggattcatcgaaggaggatggcctggcctgatcaatggctggtacggcttccagcaccagaatgagcagggagtgggaatggccgccgataaggagtctacccagaaggccatcgaccagatcaccaccaagatcaacaatatcatcgagaagatgaacggcaactacgacagcatcaggggcgagtttagccaggtggagcagcggattaacatgctggccgacaggattgatgatgccgtgaccgatgtgtggagctacaacgccaaactgctggtgctgctggaaaacgacaagaccctggacatgcacgacgccaatgtgagaaacctgcacgaccaggtgaggagagtgctgaaaaccaacgccatcgacgagggcaatggctgttttgagctgctgcacaagtgtaacgacagctgtatggagaccatccggaacggcacctataaccacaccgagtacgaggaggagagcaagctgaagaggcaggagatcgagggcatcaagctgaagtccgacgacagcgtgtacaaggccctgagcatctacagctgtatcgccagcagcattgtgctggtgggactgatcctggcctttatcatgtgggcctgctccagcggcaactgtcggttcaatgtgtgtatctgatgaacacgtgggatccagatctgctgtgccttctagttgccagccatctgttgtttgcccctcccccgtgccttccttgaccctggaaggtgccactcccactgtcctttcctaataaaatgaggaaattgcatcgcattgtctgagtaggtgtcattctattctggggggtggggtggggcaggacagcaagggggaggattgggaagacaatagcaggcatgctggggatgcggtgggctctatgggtacccaggtgctgaagaattgacccggttcctcctgggccagaaagaagcaggcacatccccttctctgtgacacaccctgtccacgcccctggttcttagttccagccccactcataggacactcatagctcaggagggctccgccttcaatcccacccgctaaagtacttggagcggtctctccctccctcatcagcccaccaaaccaaacctagcctccaagagtgggaagaaattaaagcaagataggctattaagtgcagagggagagaaaatgcctccaacatgtgaggaagtaatgagagaaatcatagaattttaaggccatgatttaaggccatcatggccttaatcttccgcttcctcgctcactgactcgctgcgctcggtcgttcggctgcggcgagcggtatcagctcactcaaaggcggtaatacggttatccacagaatcaggggataacgcaggaaagaacatgtgagcaaaaggccagcaaaaggccaggaaccgtaaaaaggccgcgttgctggcgtttttccataggctccgcccccctgacgagcatcacaaaaatcgacgctcaagtcagaggtggcgaaacccgacaggactataaagataccaggcgtttccccctggaagctccctcgtgcgctctcctgttccgaccctgccgcttaccggatacctgtccgcctttctcccttcgggaagcgtggcgctttctcatagctcacgctgtaggtatctcagttcggtgtaggtcgttcgctccaagctgggctgtgtgcacgaaccccccgttcagcccgaccgctgcgccttatccggtaactatcgtcttgagtccaacccggtaagacacgacttatcgccactggcagcagccactggtaacaggattagcagagcgaggtatgtaggcggtgctacagagttcttgaagtggtggcctaactacggctacactagaagaacagtatttggtatctgcgctctgctgaagccagttaccttcggaaaaagagttggtagctcttgatccggcaaacaaaccaccgctggtagcggtggtttttttgtttgcaagcagcagattacgcgcagaaaaaaaggatctcaagaagatcctttgatcttttctacggggtctgacgctcagtggaacgaaaactcacgttaagggattttggtcatgagattatcaaaaaggatcttcacctagatccttttaaattaaaaatgaagttttaaatcaatctaaagtatatatgagtaaacttggtctgacagttaccaatgcttaatcagtgaggcacctatctcagcgatctgtctatttcgttcatccatagttgcctgactcggggggggggggcgctgaggtctgcctcgtgaagaaggtgttgctgactcataccaggcctgaatcgccccatcatccagccagaaagtgagggagccacggttgatgagagctttgttgtaggtggaccagttggtgattttgaacttttgctttgccacggaacggtctgcgttgtcgggaagatgcgtgatctgatccttcaactcagcaaaagttcgatttattcaacaaagccgccgtcccgtcaagtcagcgtaatgctctgccagtgttacaaccaattaaccaattctgattagaaaaactcatcgagcatcaaatgaaactgcaatttattcatatcaggattatcaataccatatttttgaaaaagccgtttctgtaatgaaggagaaaactcaccgaggcagttccataggatggcaagatcctggtatcggtctgcgattccgactcgtccaacatcaatacaacctattaatttcccctcgtcaaaaataaggttatcaagtgagaaatcaccatgagtgacgactgaatccggtgagaatggcaaaagcttatgcatttctttccagacttgttcaacaggccagccattacgctcgtcatcaaaatcactcgcatcaaccaaaccgttattcattcgtgattgcgcctgagcgagacgaaatacgcgatcgctgttaaaaggacaattacaaacaggaatcgaatgcaaccggcgcaggaacactgccagcgcatcaacaatattttcacctgaatcaggatattcttctaatacctggaatgctgttttcccggggatcgcagtggtgagtaaccatgcatcatcaggagtacggataaaatgcttgatggtcggaagaggcataaattccgtcagccagtttagtctgaccatctcatctgtaacatcattggcaacgctacctttgccatgtttcagaaacaactctggcgcatcgggcttcccatacaatcgatagattgtcgcacctgattgcccgacattatcgcgagcccatttatacccatataaatcagcatccatgttggaatttaatcgcggcctcgagcaagacgtttcccgttgaatatggctcataacaccccttgtattactgtttatgtaagcagacagttttattgttcatgatgatatatttttatcttgtgcaatgtaacatcagagattttgagacacaacgtggctttccccccccccccattattgaagcatttatcagggttattgtctcatgagcggatacatatttgaatgtatttagaaaaataaacaaataggggttccgcgcacatttccccgaaaagtgccacctgacgtctaagaaaccattattatcatgacattaacctataaaaataggcgtatcacgaggccctttcgtc

SEQ ID NO: 42 - DNA, 6114 bp, Artificial Sequence
  Plasmid DNA: 53340
tcgcgcgtttcggtgatgacggtgaaaacctctgacacatgcagctcccggagacggtcacagcttgtctgtaagcggatgccgggagcagacaagcccgtcagggcgcgtcagcgggtgttggcgggtgtcggggctggcttaactatgcggcatcagagcagattgtactgagagtgcaccatatgcggtgtgaaataccgcacagatgcgtaaggagaaaataccgcatcagattggctattggccattgcatacgttgtatccatatcataatatgtacatttatattggctcatgtccaacattaccgccatgttgacattgattattgactagttattaatagtaatcaattacgggaacttccatagcccatatatggagttccgcgttacataacttacgggaatttccaaacctggctgaccgcccaacgacccccgcccattgacgtcaataatgacgtatgttcccatagtaacgccaatagggaacttccattgacgtcaatgggtggagtatttacggtaaactgcccacttgggaatttccaagtgtatcatatgccaagtacgccccctattgacgtcaatgacgggaacttccataagcttgcattatgcccagtacatgaccttatgggaatttcctacttggcagtacatctacgtattagtcatcgctattaccatggtgatgcggttttggcagtacatcaatgggcgtggatagcggtttgactcacgggaacttccaagtctccaccccattgacgtcaatgggagtttgttttgactcaccaaaatcaacgggaattcccaaaatgtcgtaacaactccgccccattgacgcaaatgggcggtaggcgtgtacggtgggaggtctatataagcagagctcgtttagtgaaccgtcagatcgcctggagacgccatccacgctgttttgacctccatagaagacaccgggaccgatccagcctccatcggctcgcatctctccttcacgcgcccgccgccctacctgaggccgccatccacgccggttgagtcgcgttctgccgcctcccgcctgtggtgcctcctgaactgcgtccgccgtctaggtaagtttaaagctcaggtcgagaccgggcctttgtccggcgctcccttggagcctacctagactcagccggctctccacgctttgcctgaccctgcttgctcaactctagttaacggtggagggcagtgtagtctgagcagtactcgttgctgccgcgcgcgccaccagacataatagctgacagactaacagactgttcctttccatgggtcttttctgcagtcaccgtcgtcgacacgtgtgatcagatatcgcggccgctctagagatatcgccaccatggacatccctgtgatcgcctttctgatcctgaccagcacatgtgtgcaggccgacagaatctgtgtgggctacctgagcaccaatagcagcgagagagtggataccctgctggagaacaacgtgcctgtgaccagctctgtggatctggtggagaccaatcacaccggcacctactgtagcctgggcggcatttctcctgtgcacctgggcgattgttctttcgagggctggattgtgggaaatcctgcctgtgccagcaatctgggcatcagggagtggagctacctgatcgaagatccttctgcccctcacggcctgtgttatcctggcgagctggacaataacggcgagctgaggcacctgtttagcggcatccggagctttagcaggacagagctgatcgcccctacatcttggggagccgtgaatgatggagtgagcagcgcctgtcaggataagggcgccagcagcttctacagaaacctggtgtggttcgtggagaggggcaacaagtaccctgtgatccggggcacctacaataataccaccggcagggacgtgctggtgatctggggaattcaccaccctgtgagcacagatgaggccagaaagctgtacgtgaacgacaacccctacaccctggtgtctacaagcagctggagccggaagtacaatctggagatcggcatcagacctggctacaacggccagaaaagctggatgaagatctactggtatctgatgcaccctggcgagagcatcagcttcgagagcaatggaggactgctggcccctaagtacggctacatcatcgaggagtacggcaagggcagaatcttccagagccggatcagaatcgccaagtgtaacaccaagtgccagacatctgtgggcggcatcaacaccaacaagaccttccagaacatcgagagaaacgccctgggagactgccctaagtacatcaagagcggccagctgaaactggccaccggcctgagaaatgtgcctcagagggagaccagaggactgtttggagccatcgccggattcatcgaaggaggatggcctggcctgatcaatggctggtacggcttccagcaccagaatgagcagggagtgggaatggccgccgataaggagtctacccagaaggccatcgaccagatcaccaccaagatcaacaatatcatcgagaagatgaacggcaactacgacagcatcaggggcgagtttagccaggtggagcagcggattaacatgctggccgacaggattgatgatgccgtgaccgatgtgtggagctacaacgccaaactgctggtgctgctggaaaacgacaagaccctggacatgcacgacgccaatgtgagaaacctgcacgaccaggtgaggagagtgctgaaaaccaacgccatcgacgagggcaatggctgttttgagctgctgcacaagtgtaacgacagctgtatggagaccatccggaacggcacctataaccacaccgagtacgaggaggagagcaagctgaagaggcaggagatcgagagcggcagactggtgcctagaggatctcctggcagcggatatattcctgaggcccctagagatggacaggcctatgtgagaaaggatggcgaatgggtgctgctgtctacatttctgggacaccaccatcaccaccattgatgaacacgtgggatccagatctgctgtgccttctagttgccagccatctgttgtttgcccctcccccgtgccttccttgaccctggaaggtgccactcccactgtcctttcctaataaaatgaggaaattgcatcgcattgtctgagtaggtgtcattctattctggggggtggggtggggcaggacagcaagggggaggattgggaagacaatagcaggcatgctggggatgcggtgggctctatgggtacccaggtgctgaagaattgacccggttcctcctgggccagaaagaagcaggcacatccccttctctgtgacacaccctgtccacgcccctggttcttagttccagccccactcataggacactcatagctcaggagggctccgccttcaatcccacccgctaaagtacttggagcggtctctccctccctcatcagcccaccaaaccaaacctagcctccaagagtgggaagaaattaaagcaagataggctattaagtgcagagggagagaaaatgcctccaacatgtgaggaagtaatgagagaaatcatagaattttaaggccatgatttaaggccatcatggccttaatcttccgcttcctcgctcactgactcgctgcgctcggtcgttcggctgcggcgagcggtatcagctcactcaaaggcggtaatacggttatccacagaatcaggggataacgcaggaaagaacatgtgagcaaaaggccagcaaaaggccaggaaccgtaaaaaggccgcgttgctggcgtttttccataggctccgcccccctgacgagcatcacaaaaatcgacgctcaagtcagaggtggcgaaacccgacaggactataaagataccaggcgtttccccctggaagctccctcgtgcgctctcctgttccgaccctgccgcttaccggatacctgtccgcctttctcccttcgggaagcgtggcgctttctcatagctcacgctgtaggtatctcagttcggtgtaggtcgttcgctccaagctgggctgtgtgcacgaaccccccgttcagcccgaccgctgcgccttatccggtaactatcgtcttgagtccaacccggtaagacacgacttatcgccactggcagcagccactggtaacaggattagcagagcgaggtatgtaggcggtgctacagagttcttgaagtggtggcctaactacggctacactagaagaacagtatttggtatctgcgctctgctgaagccagttaccttcggaaaaagagttggtagctcttgatccggcaaacaaaccaccgctggtagcggtggtttttttgtttgcaagcagcagattacgcgcagaaaaaaaggatctcaagaagatcctttgatcttttctacggggtctgacgctcagtggaacgaaaactcacgttaagggattttggtcatgagattatcaaaaaggatcttcacctagatccttttaaattaaaaatgaagttttaaatcaatctaaagtatatatgagtaaacttggtctgacagttaccaatgcttaatcagtgaggcacctatctcagcgatctgtctatttcgttcatccatagttgcctgactcggggggggggggcgctgaggtctgcctcgtgaagaaggtgttgctgactcataccaggcctgaatcgccccatcatccagccagaaagtgagggagccacggttgatgagagctttgttgtaggtggaccagttggtgattttgaacttttgctttgccacggaacggtctgcgttgtcgggaagatgcgtgatctgatccttcaactcagcaaaagttcgatttattcaacaaagccgccgtcccgtcaagtcagcgtaatgctctgccagtgttacaaccaattaaccaattctgattagaaaaactcatcgagcatcaaatgaaactgcaatttattcatatcaggattatcaataccatatttttgaaaaagccgtttctgtaatgaaggagaaaactcaccgaggcagttccataggatggcaagatcctggtatcggtctgcgattccgactcgtccaacatcaatacaacctattaatttcccctcgtcaaaaataaggttatcaagtgagaaatcaccatgagtgacgactgaatccggtgagaatggcaaaagcttatgcatttctttccagacttgttcaacaggccagccattacgctcgtcatcaaaatcactcgcatcaaccaaaccgttattcattcgtgattgcgcctgagcgagacgaaatacgcgatcgctgttaaaaggacaattacaaacaggaatcgaatgcaaccggcgcaggaacactgccagcgcatcaacaatattttcacctgaatcaggatattcttctaatacctggaatgctgttttcccggggatcgcagtggtgagtaaccatgcatcatcaggagtacggataaaatgcttgatggtcggaagaggcataaattccgtcagccagtttagtctgaccatctcatctgtaacatcattggcaacgctacctttgccatgtttcagaaacaactctggcgcatcgggcttcccatacaatcgatagattgtcgcacctgattgcccgacattatcgcgagcccatttatacccatataaatcagcatccatgttggaatttaatcgcggcctcgagcaagacgtttcccgttgaatatggctcataacaccccttgtattactgtttatgtaagcagacagttttattgttcatgatgatatatttttatcttgtgcaatgtaacatcagagattttgagacacaacgtggctttccccccccccccattattgaagcatttatcagggttattgtctcatgagcggatacatatttgaatgtatttagaaaaataaacaaataggggttccgcgcacatttccccgaaaagtgccacctgacgtctaagaaaccattattatcatgacattaacctataaaaataggcgtatcacgaggccctttcgtc

SEQ ID NO: 43 - DNA, 6128 bp, Artificial Sequence
  Plasmid DNA: 53955
tcgcgcgtttcggtgatgacggtgaaaacctctgacacatgcagctcccggagacggtcacagcttgtctgtaagcggatgccgggagcagacaagcccgtcagggcgcgtcagcgggtgttggcgggtgtcggggctggcttaactatgcggcatcagagcagattgtactgagagtgcaccatatgcggtgtgaaataccgcacagatgcgtaaggagaaaataccgcatcagattggctattggccattgcatacgttgtatccatatcataatatgtacatttatattggctcatgtccaacattaccgccatgttgacattgattattgactagttattaatagtaatcaattacggggtcattagttcatagcccatatatggagttccgcgttacataacttacggtaaatggcccgcctggctgaccgcccaacgacccccgcccattgacgtcaataatgacgtatgttcccatagtaacgccaatagggactttccattgacgtcaatgggtggagtatttacggtaaactgcccacttggcagtacatcaagtgtatcatatgccaagtacgccccctattgacgtcaatgacggtaaatggcccgcctggcattatgcccagtacatgaccttatgggactttcctacttggcagtacatctacgtattagtcatcgctattaccatggtgatgcggttttggcagtacatcaatgggcgtggatagcggtttgactcacggggatttccaagtctccaccccattgacgtcaatgggagtttgttttggcaccaaaatcaacgggactttccaaaatgtcgtaacaactccgccccattgacgcaaatgggcggtaggcgtgtacggtgggaggtctatataagcagagctcgtttagtgaaccgtcagatcgcctggagacgccatccacgctgttttgacctccatagaagacaccgggaccgatccagcctccatcggctcgcatctctccttcacgcgcccgccgccctacctgaggccgccatccacgccggttgagtcgcgttctgccgcctcccgcctgtggtgcctcctgaactgcgtccgccgtctaggtaagtttaaagctcaggtcgagaccgggcctttgtccggcgctcccttggagcctacctagactcagccggctctccacgctttgcctgaccctgcttgctcaactctagttaacggtggagggcagtgtagtctgagcagtactcgttgctgccgcgcgcgccaccagacataatagctgacagactaacagactgttcctttccatgggtcttttctgcagtcaccgtcgtcgacacgtgtgatcagatatcgcggccgctctagagatatcgccaccatgaaggccaaactgctggtgctgctgtgtgccctggccgccacagatgccgataccatctgtatcggctaccacgccaacaatagcaccgacaccgtggatacactgctggagaagaacgtgaccgtgacccactctgtgaacctgctggaggacagccacaatggcaagctgtgtaagctgaaaggcatcgcccctctgcagctgggcaagtgtaatatcgccggatggctgctgggaaaccccgagtgtgattctctgctgcctgccaagagctggagctacatcgtggagacccccaattctgagaatggcgcctgctaccctggcgacttcatcgattacgaggagctgaaggagcagctgagttctgtctctagcctggagagattcgagatcttccccaaggagagcagctggcccaatcacaataccctgaagggagtgacagccgcctgtagccacagaggcaagagcagcttctaccggaatctgctgtggctgaccaagaccggcgatagctaccccaagctgaacaacagctacgtgaacaacaagggcaaggaagtgctggtgctgtggggagtgcaccaccctagcagcagcaatgagcagcagagcctgtaccacaacgtgaacgcctatgtgagcgtggtgtccagcaactacaaccggagattcacccctgaaatcgccgccagacccaaagtgagagaccagcccggcaggatgaattactactggaccctgctggagcctggcgataccatcatctttgaggccaccggcaatctgattgccccttggtacgcctttgccctgagcagaggctttggcagcggcatcatcacaagcaacgccagcatgcacgagtgtaacaccaagagccagacacctcagggcgccatcaatagcagcctgcccttccagaatatccaccccgtgcctatcggcgagtgtcccaagtatgtgaggagcaccaagctgagaatggtgaccggcctgagaaacatccctagcatccagagcagaggactgtttggagccatcgccggattcatcgagggaggatggaccggaatgatcgatggctggtacggctaccaccaccagaatgagcagggctctggatatgccgccgatcagaagtctacccagaacgccatcaacggcatcaccaacaaggtgaacagcatcatcgagaagatgaacacccagttcaccgccgtgtccaaggagttcaacaacctggagaagcggatggagaacctgaacaagaaggtggacgacggctttctggacatctggacctacaatgccgagctgctcgtgctgctcgagaatgagaggaccctggacttccacgacagcaacgtgaagaacctgtatgagaaggtgaagagccagctgaagaacaacgccaaggagatcggcaacggctgcttcgagttctaccacaagtgtgacaacgagtgtatggagtctgtgaggaacggcacctacgactaccctaagtacagcgaggagagcaagctgaaccgggagaagatcgatggcgtgaagctggagagcatgggcgtgtatcagatcctggccatctacagcacagtggcctcttctctggtcctcctggtgtctctgggcgcaatctccttttggatgtgctccaacggcagcctgcagtgcaggatctgtatctgatgaacacgtgggatccagatctgctgtgccttctagttgccagccatctgttgtttgcccctcccccgtgccttccttgaccctggaaggtgccactcccactgtcctttcctaataaaatgaggaaattgcatcgcattgtctgagtaggtgtcattctattctggggggtggggtggggcaggacagcaagggggaggattgggaagacaatagcaggcatgctggggatgcggtgggctctatgggtacccaggtgctgaagaattgacccggttcctcctgggccagaaagaagcaggcacatccccttctctgtgacacaccctgtccacgcccctggttcttagttccagccccactcataggacactcatagctcaggagggctccgccttcaatcccacccgctaaagtacttggagcggtctctccctccctcatcagcccaccaaaccaaacctagcctccaagagtgggaagaaattaaagcaagataggctattaagtgcagagggagagaaaatgcctccaacatgtgaggaagtaatgagagaaatcatagaattttaaggccatgatttaaggccatcatggccttaatcttccgcttcctcgctcactgactcgctgcgctcggtcgttcggctgcggcgagcggtatcagctcactcaaaggcggtaatacggttatccacagaatcaggggataacgcaggaaagaacatgtgagcaaaaggccagcaaaaggccaggaaccgtaaaaaggccgcgttgctggcgtttttccataggctccgcccccctgacgagcatcacaaaaatcgacgctcaagtcagaggtggcgaaacccgacaggactataaagataccaggcgtttccccctggaagctccctcgtgcgctctcctgttccgaccctgccgcttaccggatacctgtccgcctttctcccttcgggaagcgtggcgctttctcatagctcacgctgtaggtatctcagttcggtgtaggtcgttcgctccaagctgggctgtgtgcacgaaccccccgttcagcccgaccgctgcgccttatccggtaactatcgtcttgagtccaacccggtaagacacgacttatcgccactggcagcagccactggtaacaggattagcagagcgaggtatgtaggcggtgctacagagttcttgaagtggtggcctaactacggctacactagaagaacagtatttggtatctgcgctctgctgaagccagttaccttcggaaaaagagttggtagctcttgatccggcaaacaaaccaccgctggtagcggtggtttttttgtttgcaagcagcagattacgcgcagaaaaaaaggatctcaagaagatcctttgatcttttctacggggtctgacgctcagtggaacgaaaactcacgttaagggattttggtcatgagattatcaaaaaggatcttcacctagatccttttaaattaaaaatgaagttttaaatcaatctaaagtatatatgagtaaacttggtctgacagttaccaatgcttaatcagtgaggcacctatctcagcgatctgtctatttcgttcatccatagttgcctgactcggggggggggggcgctgaggtctgcctcgtgaagaaggtgttgctgactcataccaggcctgaatcgccccatcatccagccagaaagtgagggagccacggttgatgagagctttgttgtaggtggaccagttggtgattttgaacttttgctttgccacggaacggtctgcgttgtcgggaagatgcgtgatctgatccttcaactcagcaaaagttcgatttattcaacaaagccgccgtcccgtcaagtcagcgtaatgctctgccagtgttacaaccaattaaccaattctgattagaaaaactcatcgagcatcaaatgaaactgcaatttattcatatcaggattatcaataccatatttttgaaaaagccgtttctgtaatgaaggagaaaactcaccgaggcagttccataggatggcaagatcctggtatcggtctgcgattccgactcgtccaacatcaatacaacctattaatttcccctcgtcaaaaataaggttatcaagtgagaaatcaccatgagtgacgactgaatccggtgagaatggcaaaagcttatgcatttctttccagacttgttcaacaggccagccattacgctcgtcatcaaaatcactcgcatcaaccaaaccgttattcattcgtgattgcgcctgagcgagacgaaatacgcgatcgctgttaaaaggacaattacaaacaggaatcgaatgcaaccggcgcaggaacactgccagcgcatcaacaatattttcacctgaatcaggatattcttctaatacctggaatgctgttttcccggggatcgcagtggtgagtaaccatgcatcatcaggagtacggataaaatgcttgatggtcggaagaggcataaattccgtcagccagtttagtctgaccatctcatctgtaacatcattggcaacgctacctttgccatgtttcagaaacaactctggcgcatcgggcttcccatacaatcgatagattgtcgcacctgattgcccgacattatcgcgagcccatttatacccatataaatcagcatccatgttggaatttaatcgcggcctcgagcaagacgtttcccgttgaatatggctcataacaccccttgtattactgtttatgtaagcagacagttttattgttcatgatgatatatttttatcttgtgcaatgtaacatcagagattttgagacacaacgtggctttccccccccccccattattgaagcatttatcagggttattgtctcatgagcggatacatatttgaatgtatttagaaaaataaacaaataggggttccgcgcacatttccccgaaaagtgccacctgacgtctaagaaaccattattatcatgacattaacctataaaaataggcgtatcacgaggccctttcgtc

SEQ ID NO: 44 - DNA, 6129 bp, Artificial Sequence
  Plasmid DNA: 53367
tcgcgcgtttcggtgatgacggtgaaaacctctgacacatgcagctcccggagacggtcacagcttgtctgtaagcggatgccgggagcagacaagcccgtcagggcgcgtcagcgggtgttggcgggtgtcggggctggcttaactatgcggcatcagagcagattgtactgagagtgcaccatatgcggtgtgaaataccgcacagatgcgtaaggagaaaataccgcatcagattggctattggccattgcatacgttgtatccatatcataatatgtacatttatattggctcatgtccaacattaccgccatgttgacattgattattgactagttattaatagtaatcaattacgggaacttccatagcccatatatggagttccgcgttacataacttacgggaatttccaaacctggctgaccgcccaacgacccccgcccattgacgtcaataatgacgtatgttcccatagtaacgccaatagggaacttccattgacgtcaatgggtggagtatttacggtaaactgcccacttgggaatttccaagtgtatcatatgccaagtacgccccctattgacgtcaatgacgggaacttccataagcttgcattatgcccagtacatgaccttatgggaatttcctacttggcagtacatctacgtattagtcatcgctattaccatggtgatgcggttttggcagtacatcaatgggcgtggatagcggtttgactcacgggaacttccaagtctccaccccattgacgtcaatgggagtttgttttgactcaccaaaatcaacgggaatttccaaaatgtcgtaacaactccgccccattgacgcaaatgggcggtaggcgtgtacggtgggaggtctatataagcagagctcgtttagtgaaccgtcagatcgcctggagacgccatccacgctgttttgacctccatagaagacaccgggaccgatccagcctccatcggctcgcatctctccttcacgcgcccgccgccctacctgaggccgccatccacgccggttgagtcgcgttctgccgcctcccgcctgtggtgcctcctgaactgcgtccgccgtctaggtaagtttaaagctcaggtcgagaccgggcctttgtccggcgctcccttggagcctacctagactcagccggctctccacgctttgcctgaccctgcttgctcaactctagttaacggtggagggcagtgtagtctgagcagtactcgttgctgccgcgcgcgccaccagacataatagctgacagactaacagactgttcctttccatgggtcttttctgcagtcaccgtcgtcgacacgtgtgatcagatatcgcggccgctctagagatatcgccaccatgatcgccctgattctggtggccctggccctgtctcacacagcctacagccagatcaccaatggcaccaccggcaaccctatcatctgtctgggacaccacgccgtggagaatggcaccagcgtgaaaaccctgaccgacaaccatgtggaagtggtgtctgccaaggaactggtggagaccaaccacaccgatgagctgtgtcctagccctctgaaactggtggatggccaggattgccacctgatcaatggcgccctgggatctcctggatgtgacaggctgcaggacaccacctgggatgtgttcatcgagagacccaccgccgtggatacctgctaccccttcgacgtgcctgattaccagagcctgaggagcattctggccagctctggcagcctggagtttatcgccgagcagttcacctggaatggcgtgaaagtggatggcagcagctctgcctgtctgagaggcggcaggaacagcttcttcagcaggctgaactggctgaccaaggccaccaacggcaattacggccccatcaacgtgaccaaggagaacacaggcagctatgtgagactgtatctgtggggagtgcaccaccctagcagcgataacgagcagaccgacctgtataaggtggccaccggcagagtgacagtgagcaccaggagcgaccagatcagcatcgtgcccaacatcggcagcagacccagagtgagaaaccagagcggcaggatcagcatctactggaccctggtgaatcctggcgacagcatcatcttcaacagcatcggcaacctgattgctcctaggggacactacaagatcagcaagagcaccaagtccaccgtgctgaagagcgacaagagaatcggcagctgtaccagcccttgcctgacagataagggcagcatccagtccgataagcccttccagaacgtgtccagaatcgccatcggcaactgccctaagtatgtgaagcagggctctctgatgctggccacaggcatgagaaacatcccccagagagagaccagaggactgtttggagccatcgccggattcatcgagaatggctggcagggactgatcgatggctggtacggcttcagacaccagaatgccgagggaacaggaacagccgccgatctgaagtctacacaggccgctattgaccagatcaacggcaagctgaaccggctgatcgagaaaaccaacgagaagtaccaccagatcgagaaggaattcgagcaggtggagggcagaatccaggacctggagaagtacgtggaggacaccaagatcgacctgtggagctacaatgccgaactgctggtggccctggagaatcagcacaccatcgacgtgaccgacagcgagatgaacaagctgttcgagagagtgaggaggcagctgagagagaacgccgaggatcagggcaatggctgcttcgagatcttccaccagtgtgacaacaactgtatcgagagcatccggaacggcacctacgaccacaacatctacagggacgaggccatcaacaaccggatcaagatcaacagcggcagactggtgcctagaggatctcctggcagcggatatattcctgaggcccctagagatggacaggcctatgtgagaaaggatggcgaatgggtgctgctgtctacatttctgggacaccaccatcaccaccattgatgaacacgtgggatccagatctgctgtgccttctagttgccagccatctgttgtttgcccctcccccgtgccttccttgaccctggaaggtgccactcccactgtcctttcctaataaaatgaggaaattgcatcgcattgtctgagtaggtgtcattctattctggggggtggggtggggcaggacagcaagggggaggattgggaagacaatagcaggcatgctggggatgcggtgggctctatgggtacccaggtgctgaagaattgacccggttcctcctgggccagaaagaagcaggcacatccccttctctgtgacacaccctgtccacgcccctggttcttagttccagccccactcataggacactcatagctcaggagggctccgccttcaatcccacccgctaaagtacttggagcggtctctccctccctcatcagcccaccaaaccaaacctagcctccaagagtgggaagaaattaaagcaagataggctattaagtgcagagggagagaaaatgcctccaacatgtgaggaagtaatgagagaaatcatagaattttaaggccatgatttaaggccatcatggccttaatcttccgcttcctcgctcactgactcgctgcgctcggtcgttcggctgcggcgagcggtatcagctcactcaaaggcggtaatacggttatccacagaatcaggggataacgcaggaaagaacatgtgagcaaaaggccagcaaaaggccaggaaccgtaaaaaggccgcgttgctggcgtttttccataggctccgcccccctgacgagcatcacaaaaatcgacgctcaagtcagaggtggcgaaacccgacaggactataaagataccaggcgtttccccctggaagctccctcgtgcgctctcctgttccgaccctgccgcttaccggatacctgtccgcctttctcccttcgggaagcgtggcgctttctcatagctcacgctgtaggtatctcagttcggtgtaggtcgttcgctccaagctgggctgtgtgcacgaaccccccgttcagcccgaccgctgcgccttatccggtaactatcgtcttgagtccaacccggtaagacacgacttatcgccactggcagcagccactggtaacaggattagcagagcgaggtatgtaggcggtgctacagagttcttgaagtggtggcctaactacggctacactagaagaacagtatttggtatctgcgctctgctgaagccagttaccttcggaaaaagagttggtagctcttgatccggcaaacaaaccaccgctggtagcggtggtttttttgtttgcaagcagcagattacgcgcagaaaaaaaggatctcaagaagatcctttgatcttttctacggggtctgacgctcagtggaacgaaaactcacgttaagggattttggtcatgagattatcaaaaaggatcttcacctagatccttttaaattaaaaatgaagttttaaatcaatctaaagtatatatgagtaaacttggtctgacagttaccaatgcttaatcagtgaggcacctatctcagcgatctgtctatttcgttcatccatagttgcctgactcggggggggggggcgctgaggtctgcctcgtgaagaaggtgttgctgactcataccaggcctgaatcgccccatcatccagccagaaagtgagggagccacggttgatgagagctttgttgtaggtggaccagttggtgattttgaacttttgctttgccacggaacggtctgcgttgtcgggaagatgcgtgatctgatccttcaactcagcaaaagttcgatttattcaacaaagccgccgtcccgtcaagtcagcgtaatgctctgccagtgttacaaccaattaaccaattctgattagaaaaactcatcgagcatcaaatgaaactgcaatttattcatatcaggattatcaataccatatttttgaaaaagccgtttctgtaatgaaggagaaaactcaccgaggcagttccataggatggcaagatcctggtatcggtctgcgattccgactcgtccaacatcaatacaacctattaatttcccctcgtcaaaaataaggttatcaagtgagaaatcaccatgagtgacgactgaatccggtgagaatggcaaaagcttatgcatttctttccagacttgttcaacaggccagccattacgctcgtcatcaaaatcactcgcatcaaccaaaccgttattcattcgtgattgcgcctgagcgagacgaaatacgcgatcgctgttaaaaggacaattacaaacaggaatcgaatgcaaccggcgcaggaacactgccagcgcatcaacaatattttcacctgaatcaggatattcttctaatacctggaatgctgttttcccggggatcgcagtggtgagtaaccatgcatcatcaggagtacggataaaatgcttgatggtcggaagaggcataaattccgtcagccagtttagtctgaccatctcatctgtaacatcattggcaacgctacctttgccatgtttcagaaacaactctggcgcatcgggcttcccatacaatcgatagattgtcgcacctgattgcccgacattatcgcgagcccatttatacccatataaatcagcatccatgttggaatttaatcgcggcctcgagcaagacgtttcccgttgaatatggctcataacaccccttgtattactgtttatgtaagcagacagttttattgttcatgatgatatatttttatcttgtgcaatgtaacatcagagattttgagacacaacgtggctttccccccccccccattattgaagcatttatcagggttattgtctcatgagcggatacatatttgaatgtatttagaaaaataaacaaataggggttccgcgcacatttccccgaaaagtgccacctgacgtctaagaaaccattattatcatgacattaacctataaaaataggcgtatcacgaggccctttcgtc

SEQ ID NO: 45 - DNA, 11377 bp, Artificial Sequence
  Plasmid DNA: 53504
aagctttactcgtaaagcgagttgaaggatcatatttagttgcgtttatgagataagattgaaagcacgtgtaaaatgtttcccgcgcgttggcacaactatttacaatgcggccaagttataaaagattctaatctgatatgttttaaaacacctttgcggcccgagttgtttgcgtacgtgactagcgaagaagatgtgtggaccgcagaacagatagtaaaacaaaaccctagtattggagcaataatcgatttaaccaacacgtctaaatattatgatggtgtgcattttttgcgggcgggcctgttatacaaaaaaattcaagtacctggccagactttgccgcctgaaagcatagttcaagaatttattgacacggtaaaagaatttacagaaaagtgtcccggcatgttggtgggcgtgcactgcacacacggtattaatcgcaccggttacatggtgtgcagatatttaatgcacaccctgggtattgcgccgcaggaagccatagatagattcgaaaaagccagaggtcacaaaattgaaagacaaaattacgttcaagatttattaatttaattaatattatttgcattctttaacaaatactttatcctattttcaaattgttgcgcttcttccagcgaaccaaaactatgcttcgcttgctccgtttagcttgtagccgatcagtggcgttgttccaatcgacggtaggattaggccggatattctccaccacaatgttggcaacgttgatgttacgtttatgcttttggttttccacgtacgtcttttggccggtaatagccgtaaacgtagtgccgtcgcgcgtcacgcacaacaccggatgtttgcgcttgtccgcggggtattgaaccgcgcgatccgacaaatccaccactttggcaactaaatcggtgacctgcgcgtcttttttctgcattatttcgtctttcttttgcatggtttcctggaagccggtgtacatgcggtttagatcagtcatgacgcgcgtgacctgcaaatctttggcctcgatctgcttgtccttgatggcaacgatgcgttcaataaactcttgttttttaacaagttcctcggttttttgcgccaccaccgcttgcagcgcgtttgtgtgctcggtgaatgtcgcaatcagcttagtcaccaactgtttgctctcctcctcccgttgtttgatcgcgggatcgtacttgccggtgcagagcacttgaggaattacttcttctaaaagccattcttgtaattctatggcgtaaggcaatttggacttcataatcagctgaatcacgccggatttagtaatgagcactgtatgcggctgcaaatacagcgggtcgccccttttcacgacgctgttagaggtagggcccccattttggatggtctgctcaaataacgatttgtatttattgtctacatgaacacgtatagctttatcacaaactgtatattttaaactgttagcgacgtccttggccacgaaccggacctgttggtcgcgctctagcacgtaccgcaggttgaacgtatcttctccaaatttaaattctccaattttaacgcgagccattttgatacacgtgtgtcgattttgcaacaactattgttttttaacgcaaactaaacttattgtggtaagcaataattaaatatgggggaacatgcgccgctacaacactcgtcgttatgaacgcagacggcgccggtctcggcgcaagcggctaaaacgtgttgcgcgttcaacgcggcaaacatcgcaaaagccaatagtacagttttgatttgcatattaacggcgattttttaaattatcttatttaataaatagttatgacgcctacaactccccgcccgcgttgactcgctgcacctcgagcagttcgttgacgccttcctccgtgtggccgaacacgtcgagcgggtggtcgatgaccagcggcgtgccgcacgcgacgcacaagtatctgtacaccgaatgatcgtcgggcgaaggcacgtcggcctccaagtggcaatattggcaaattcgaaaatatatacagttgggttgtttgcgcatatctatcgtggcgttgggcatgtacgtccgaacgttgatttgcatgcaagccgaaattaaatcattgcgattagtgcgattaaaacgttgtacatcctcgcttttaatcatgccgtcgattaaatcgcgcaatcgagtcaagtgatcaaagtgtggaataatgttttctttgtattcccgagtcaagcgcagcgcgtattttaacaaactagccatcttgtaagttagtttcatttaatgcaactttatccaataatatattatgtatcgcacgtcaagaattaacaatgcgcccgttgtcgcatctcaacacgactatgatagagatcaaataaagcgcgaattaaatagcttgcgacgcaacgtgcacgatctgtgcacgcgttccggcacgagctttgattgtaataagtttttacgaagcgatgacatgacccccgtagtgacaacgatcacgcccaaaagaactgccgactacaaaattaccgagtatgtcggtgacgttaaaactattaagccatccaatcgaccgttagtcgaatcaggaccgctggtgcgagaagccgcgaagtatggcgaatgcatcgtataacgtgtggagtccgctcattagagcgtcatgtttagacaagaaagctacatatttaattgatcccgatgattttattgataaattgaccctaactccatacacggtattctacaatggcggggttttggtcaaaatttccggactgcgattgtacatgctgttaacggctccgcccactattaatgaaattaaaaattccaattttaaaaaacgcagcaagagaaacatttgtatgaaagaatgcgtagaaggaaagaaaaatgtcgtcgacatgctgaacaacaagattaatatgcctccgtgtataaaaaaaatattgaacgatttgaaagaaaacaatgtaccgcgcggcggtatgtacaggaagaggtttatactaaactgttacattgcaaacgtggtttcgtgtgccaagtgtgaaaaccgatgtttaatcaaggctctgacgcatttctacaaccacgactccaagtgtgtgggtgaagtcatgcatcttttaatcaaatcccaagatgtgtataaaccaccaaactgccaaaaaatgaaaactgtcgacaagctctgtccgtttgctggcaactgcaagggtctcaatcctatttgtaattattgaataataaaacaattataaatgctaaatttgttttttattaacgatacaaaccaaacgcaacaagaacatttgtagtattatctataattgaaaacgcgtagttataatcgctgaggtaatatttaaaatcattttcaaatgattcacagttaatttgcgacaatataattttattttcacataaactagacgccttgtcgtcttcttcttcgtattccttctctttttcatttttctcctcataaaaattaacatagttattatcgtatccatatatgtatctatcgtatagagtaaattttttgttgtcataaatatatatgtcttttttaatggggtgtatagtaccgctgcgcatagtttttctgtaatttacaacagtgctattttctggtagttcttcggagtgtgttgctttaattattaaatttatataatcaatgaatttgggatcgtcggttttgtacaatatgttgccggcatagtacgcagcttcttctagttcaattacaccattttttagcagcaccggattaacataactttccaaaatgttgtacgaaccgttaaacaaaaacagttcacctcccttttctatactattgtctgcgagcagttgtttgttgttaaaaataacagccattgtaatgagacgcacaaactaatatcacaaactggaaatgtctatcaatatatagttgctgatatcatggagataattaaaatgataaccatctcgcaaataaataagtattttactgttttcgtaacagttttgtaataaaaaaacctataaatattccggattattcataccgtcccaccatcgggcgcggatctatgctactagtaaatcagtcacaccaaggcttcaataaggaacacacaagcaagatggtaagcgctattgttttatatgtgcttttggcggcggcggcgcattctgcctttgcggcggatcccggggacaagatctgtctgggacaccacgccgtgtctaatggcaccaaggtgaacaccctgaccgagaggggcgtggaagtggtgaatgccaccgagaccgtggagagaaccaacgtgcccaggatctgtagcaagggcaagagaaccgtggatctgggacagtgtggactgctgggcacaatcacaggacccccccagtgtgatcagttcctggagttcagcgccgatctgatcatcgagaggagagaaggcagcgatgtgtgctaccctggcaagttcgtgaatgaggaggccctgaggcagatcctgagagagagcggcggcatcgacaaggaaaccatgggcttcacctacagcggcatcagaaccaatggcaccacctccgcctgtagaagaagcggcagcagcttctacgccgagatgaagtggctgctgtccaacacagacaatgccgccttcccccagatgaccaagagctacaagaacaccagaaaggaccccgccctgatcatttggggcatccaccacagcggcagcacaacagagcagaccaagctgtacggcagcggcaataagctgatcacagtgggcagcagcaattaccagcagagcttcgtgccttctcctggagccagacctcaggtgaacggccagagcggcagaatcgatttccactggctgatcctgaaccccaacgacaccgtgaccttcagcttcaacggcgcctttatcgcccctgatagggcctctttcctgaggggcaagagcatgggcatccagtctgaagtgcaggtggacgccaattgtgagggcgattgctaccacagcgggggcaccatcatcagcaacctgcccttccagaacatcaacagcagagctgtgggcaagtgtcccagatacgtgaagcaggagtctctgctgctggccaccggcatgaagaatgtgcccgagatccctcagagagagaccagaggcctgtttggagccatcgccggattcatcgagaatggctgggagggactgatcgatggctggtacggcttcagacaccagaatgcccagggagaaggaacagccgccgactacaagtctacacagagcgctattgaccagatcaccggcaagctgaacaggctgatcgagaaaaccaaccagcagtttgagctgatcgacaacgagttcaccgaggtggagagacagatcggcaacgtgatcaactggaccagggacagcatgaccgaagtgtggagctacaatgccgagctgctggtggccatggagaatcagcacaccatcgacctggccgacagcgagatgaataagctgtacgagcgggtgaagagacagctgagagagaacgccgaagaggacggcacaggctgcttcgagatcttccacaagtgtgacgacgactgtatggccagcatccggaacaacacctacgaccacagcaagtacagagaggaggccatccagaacagaatccagatcgacagcggcagactggtgcctagaggatctcctggcagcggatatattcctgaggcccctagagatggacaggcctatgtgagaaaggatggcgaatgggtgctgctgtctacatttctgggacaccaccatcaccaccattgatgagcggccgctgcagatctgatcctttcctgggacccggcaagaaccaaaaactcactctcttcaaggaaatccgtaatgttaaacccgacacgatgaagcttgtcgttggatggaaaggaaaagagttctacagggaaacttggacccgcttcatggaagacagcttccccattgttaacgaccaagaagtgatggatgttttccttgttgtcaacatgcgtcccactagacccaaccgttgttacaaattcctggcccaacacgctctgcgttgcgaccccgactatgtacctcatgacgtgattaggatcgtcgagccttcatgggtgggcagcaacaacgagtaccgcatcagcctggctaagaagggcggcggctgcccaataatgaaccttcactctgagtacaccaactcgttcgaacagttcatcgatcgtgtcatctgggagaacttctacaagcccatcgtttacatcggtaccgactctgctgaagaggaggaaattctccttgaagtttccctggtgttcaaagtaaaggagtttgcaccagacgcacctctgttcactggtccggcgtattaaaacacgatacattgttattagtacatttattaagcgctagattctgtgcgttgttgatttacagacaattgttgtacgtattttaataattcattaaatttataatctttagggtggtatgttagagcgaaaatcaaatgattttcagcgtctttatatctgaatttaaatattaaatcctcaatagatttgtaaaataggtttcgattagtttcaaacaagggttgtttttccgaaccgatggctggactatctaatggattttcgctcaacgccacaaaacttgccaaatcttgtagcagcaatctagctttgtcgatattcgtttgtgttttgttttgtaataaaggttcgacgtcgttcaaaatattatgcgcttttgtatttctttcatcactgtcgttagtgtacaattgactcgacgtaaacacgttaaataaagcttggacatatttaacatcgggcgtgttagctttattaggccgattatcgtcgtcgtcccaaccctcgtcgttagaagttgcttccgaagacgattttgccatagccacacgacgcctattaattgtgtcggctaacacgtccgcgatcaaatttgtagttgagctttttggaattatttctgattgcgggcgtttttgggcgggtttcaatctaactgtgcccgattttaattcagacaacacgttagaaagcgatggtgcaggcggtggtaacatttcagacggcaaatctactaatggcggcggtggtggagctgatgataaatctaccatcggtggaggcgcaggcggggctggcggcggaggcggaggcggaggtggtggcggtgatgcagacggcggtttaggctcaaatgtctctttaggcaacacagtcggcacctcaactattgtactggtttcgggcgccgtttttggtttgaccggtctgagacgagtgcgatttttttcgtttctaatagcttccaacaattgttgtctgtcgtctaaaggtgcagcgggttgaggttccgtcggcattggtggagcgggcggcaattcagacatcgatggtggtggtggtggtggaggcgctggaatgttaggcacgggagaaggtggtggcggcggtgccgccggtataatttgttctggtttagtttgttcgcgcacgattgtgggcaccggcgcaggcgccgctggctgcacaacggaaggtcgtctgcttcgaggcagcgcttggggtggtggcaattcaatattataattggaatacaaatcgtaaaaatctgctataagcattgtaatttcgctatcgtttaccgtgccgatatttaacaaccgctcaatgtaagcaattgtattgtaaagagattgtctcaagctccgcacgccgataacaagccttttcatttttactacagcattgtagtggcgagacacttcgctgtcgtcgacgtacatgtatgctttgttgtcaaaaacgtcgttggcaagctttaaaatatttaaaagaacatctctgttcagcaccactgtgttgtcgtaaatgttgtttttgataatttgcgcttccgcagtatcgacacgttcaaaaaattgatgcgcatcaattttgttgttcctattattgaataaataagattgtacagattcatatctacgattcgtcatggccaccacaaatgctacgctgcaaacgctggtacaattttacgaaaactgcaaaaacgtcaaaactcggtataaaataatcaacgggcgctttggcaaaatatctattttatcgcacaagcccactagcaaattgtatttgcagaaaacaatttcggcgcacaattttaacgctgacgaaataaaagttcaccagttaatgagcgaccacccaaattttataaaaatctattttaatcacggttccatcaacaaccaagtgatcgtgatggactacattgactgtcccgatttatttgaaacactacaaattaaaggcgagctttcgtaccaacttgttagcaatattattagacagctgtgtgaagcgctcaacgatttgcacaagcacaatttcatacacaacgacataaaactcgaaaatgtcttatatttcgaagcacttgatcgcgtgtatgtttgcgattacggattgtgcaaacacgaaaactcacttagcgtgcacgacggcacgttggagtattttagtccggaaaaaattcgacacacaactatgcacgtttcgtttgactggtacgcggcgtgttaacatacaagttgctaaccggcggttcgtaatcatggtcatagctgtttcctgtgtgaaattgttatccgctcacaattccacacaacatacgagccggaagcataaagtgtaaagcctggggtgcctaatgagtgagctaactcacattaattgcgttgcgctcactgcccgctttccagtcgggaaacctgtcgtgccagctgcattaatgaatcggccaacgcgcggggagaggcggtttgcgtattgggcgctcttccgcttcctcgctcactgactcgctgcgctcggtcgttcggctgcggcgagcggtatcagctcactcaaaggcggtaatacggttatccacagaatcaggggataacgcaggaaagaacatgtgagcaaaaggccagcaaaaggccaggaaccgtaaaaaggccgcgttgctggcgtttttccataggctccgcccccctgacgagcatcacaaaaatcgacgctcaagtcagaggtggcgaaacccgacaggactataaagataccaggcgtttccccctggaagctccctcgtgcgctctcctgttccgaccctgccgcttaccggatacctgtccgcctttctcccttcgggaagcgtggcgctttctcatagctcacgctgtaggtatctcagttcggtgtaggtcgttcgctccaagctgggctgtgtgcacgaaccccccgttcagcccgaccgctgcgccttatccggtaactatcgtcttgagtccaacccggtaagacacgacttatcgccactggcagcagccactggtaacaggattagcagagcgaggtatgtaggcggtgctacagagttcttgaagtggtggcctaactacggctacactagaaggacagtatttggtatctgcgctctgctgaagccagttaccttcggaaaaagagttggtagctcttgatccggcaaacaaaccaccgctggtagcggtggtttttttgtttgcaagcagcagattacgcgcagaaaaaaaggatctcaagaagatcctttgatcttttctacggggtctgacgctcagtggaacgaaaactcacgttaagggattttggtcatgagattatcaaaaaggatcttcacctagatccttttaaattaaaaatgaagttttaaatcaatctaaagtatatatgagtaaacttggtctgacagttaccaatgcttaatcagtgaggcacctatctcagcgatctgtctatttcgttcatccatagttgcctgactccccgtcgtgtagataactacgatacgggagggcttaccatctggccccagtgctgcaatgataccgcgagacccacgctcaccggctccagatttatcagcaataaaccagccagccggaagggccgagcgcagaagtggtcctgcaactttatccgcctccatccagtctattaattgttgccgggaagctagagtaagtagttcgccagttaatagtttgcgcaacgttgttgccattgctacaggcatcgtggtgtcacgctcgtcgtttggtatggcttcattcagctccggttcccaacgatcaaggcgagttacatgatcccccatgttgtgcaaaaaagcggttagctccttcggtcctccgatcgttgtcagaagtaagttggccgcagtgttatcactcatggttatggcagcactgcataattctcttactgtcatgccatccgtaagatgcttttctgtgactggtgagtactcaaccaagtcattctgagaatagtgtatgcggcgaccgagttgctcttgcccggcgtcaatacgggataataccgcgccacatagcagaactttaaaagtgctcatcattggaaaacgttcttcggggcgaaaactctcaaggatcttaccgctgttgagatccagttcgatgtaacccactcgtgcacccaactgatcttcagcatcttttactttcaccagcgtttctgggtgagcaaaaacaggaaggcaaaatgccgcaaaaaagggaataagggcgacacggaaatgttgaatactcatactcttcctttttcaatattattgaagcatttatcagggttattgtctcatgagcggatacatatttgaatgtatttagaaaaataaacaaataggggttccgcgcacatttccccgaaaagtgccacctgacgtctaagaaaccattattatcatgacattaacctataaaaataggcgtatcacgaggccctttcgtctcgcgcgtttcggtgatgacggtgaaaacctctgacacatgcagctcccggagacggtcacagcttgtctgtaagcggatgccgggagcagacaagcccgtcagggcgcgtcagcgggtgttggcgggtgtcggggctggcttaactatgcggcatcagagcagattgtactgagagtgcaccatatgcggtgtgaaataccgcacagatgcgtaaggagaaaataccgcatcaggcgccattcgccattcaggctgcgcaactgttgggaagggcgatcggtgcgggcctcttcgctattacgccagctggcgaaagggggatgtgctgcaaggcgattaagttgggtaacgccagggttttcccagtcacgacgttgtaaaacgacggccagtgcc

SEQ ID NO: 46 - DNA, 11383 bp, Artificial Sequence
  Plasmid DNA: 53510
aagctttactcgtaaagcgagttgaaggatcatatttagttgcgtttatgagataagattgaaagcacgtgtaaaatgtttcccgcgcgttggcacaactatttacaatgcggccaagttataaaagattctaatctgatatgttttaaaacacctttgcggcccgagttgtttgcgtacgtgactagcgaagaagatgtgtggaccgcagaacagatagtaaaacaaaaccctagtattggagcaataatcgatttaaccaacacgtctaaatattatgatggtgtgcattttttgcgggcgggcctgttatacaaaaaaattcaagtacctggccagactttgccgcctgaaagcatagttcaagaatttattgacacggtaaaagaatttacagaaaagtgtcccggcatgttggtgggcgtgcactgcacacacggtattaatcgcaccggttacatggtgtgcagatatttaatgcacaccctgggtattgcgccgcaggaagccatagatagattcgaaaaagccagaggtcacaaaattgaaagacaaaattacgttcaagatttattaatttaattaatattatttgcattctttaacaaatactttatcctattttcaaattgttgcgcttcttccagcgaaccaaaactatgcttcgcttgctccgtttagcttgtagccgatcagtggcgttgttccaatcgacggtaggattaggccggatattctccaccacaatgttggcaacgttgatgttacgtttatgcttttggttttccacgtacgtcttttggccggtaatagccgtaaacgtagtgccgtcgcgcgtcacgcacaacaccggatgtttgcgcttgtccgcggggtattgaaccgcgcgatccgacaaatccaccactttggcaactaaatcggtgacctgcgcgtcttttttctgcattatttcgtctttcttttgcatggtttcctggaagccggtgtacatgcggtttagatcagtcatgacgcgcgtgacctgcaaatctttggcctcgatctgcttgtccttgatggcaacgatgcgttcaataaactcttgttttttaacaagttcctcggttttttgcgccaccaccgcttgcagcgcgtttgtgtgctcggtgaatgtcgcaatcagcttagtcaccaactgtttgctctcctcctcccgttgtttgatcgcgggatcgtacttgccggtgcagagcacttgaggaattacttcttctaaaagccattcttgtaattctatggcgtaaggcaatttggacttcataatcagctgaatcacgccggatttagtaatgagcactgtatgcggctgcaaatacagcgggtcgccccttttcacgacgctgttagaggtagggcccccattttggatggtctgctcaaataacgatttgtatttattgtctacatgaacacgtatagctttatcacaaactgtatattttaaactgttagcgacgtccttggccacgaaccggacctgttggtcgcgctctagcacgtaccgcaggttgaacgtatcttctccaaatttaaattctccaattttaacgcgagccattttgatacacgtgtgtcgattttgcaacaactattgttttttaacgcaaactaaacttattgtggtaagcaataattaaatatgggggaacatgcgccgctacaacactcgtcgttatgaacgcagacggcgccggtctcggcgcaagcggctaaaacgtgttgcgcgttcaacgcggcaaacatcgcaaaagccaatagtacagttttgatttgcatattaacggcgattttttaaattatcttatttaataaatagttatgacgcctacaactccccgcccgcgttgactcgctgcacctcgagcagttcgttgacgccttcctccgtgtggccgaacacgtcgagcgggtggtcgatgaccagcggcgtgccgcacgcgacgcacaagtatctgtacaccgaatgatcgtcgggcgaaggcacgtcggcctccaagtggcaatattggcaaattcgaaaatatatacagttgggttgtttgcgcatatctatcgtggcgttgggcatgtacgtccgaacgttgatttgcatgcaagccgaaattaaatcattgcgattagtgcgattaaaacgttgtacatcctcgcttttaatcatgccgtcgattaaatcgcgcaatcgagtcaagtgatcaaagtgtggaataatgttttctttgtattcccgagtcaagcgcagcgcgtattttaacaaactagccatcttgtaagttagtttcatttaatgcaactttatccaataatatattatgtatcgcacgtcaagaattaacaatgcgcccgttgtcgcatctcaacacgactatgatagagatcaaataaagcgcgaattaaatagcttgcgacgcaacgtgcacgatctgtgcacgcgttccggcacgagctttgattgtaataagtttttacgaagcgatgacatgacccccgtagtgacaacgatcacgcccaaaagaactgccgactacaaaattaccgagtatgtcggtgacgttaaaactattaagccatccaatcgaccgttagtcgaatcaggaccgctggtgcgagaagccgcgaagtatggcgaatgcatcgtataacgtgtggagtccgctcattagagcgtcatgtttagacaagaaagctacatatttaattgatcccgatgattttattgataaattgaccctaactccatacacggtattctacaatggcggggttttggtcaaaatttccggactgcgattgtacatgctgttaacggctccgcccactattaatgaaattaaaaattccaattttaaaaaacgcagcaagagaaacatttgtatgaaagaatgcgtagaaggaaagaaaaatgtcgtcgacatgctgaacaacaagattaatatgcctccgtgtataaaaaaaatattgaacgatttgaaagaaaacaatgtaccgcgcggcggtatgtacaggaagaggtttatactaaactgttacattgcaaacgtggtttcgtgtgccaagtgtgaaaaccgatgtttaatcaaggctctgacgcatttctacaaccacgactccaagtgtgtgggtgaagtcatgcatcttttaatcaaatcccaagatgtgtataaaccaccaaactgccaaaaaatgaaaactgtcgacaagctctgtccgtttgctggcaactgcaagggtctcaatcctatttgtaattattgaataataaaacaattataaatgctaaatttgttttttattaacgatacaaaccaaacgcaacaagaacatttgtagtattatctataattgaaaacgcgtagttataatcgctgaggtaatatttaaaatcattttcaaatgattcacagttaatttgcgacaatataattttattttcacataaactagacgccttgtcgtcttcttcttcgtattccttctctttttcatttttctcctcataaaaattaacatagttattatcgtatccatatatgtatctatcgtatagagtaaattttttgttgtcataaatatatatgtcttttttaatggggtgtatagtaccgctgcgcatagtttttctgtaatttacaacagtgctattttctggtagttcttcggagtgtgttgctttaattattaaatttatataatcaatgaatttgggatcgtcggttttgtacaatatgttgccggcatagtacgcagcttcttctagttcaattacaccattttttagcagcaccggattaacataactttccaaaatgttgtacgaaccgttaaacaaaaacagttcacctcccttttctatactattgtctgcgagcagttgtttgttgttaaaaataacagccattgtaatgagacgcacaaactaatatcacaaactggaaatgtctatcaatatatagttgctgatatcatggagataattaaaatgataaccatctcgcaaataaataagtattttactgttttcgtaacagttttgtaataaaaaaacctataaatattccggattattcataccgtcccaccatcgggcgcggatctatgctactagtaaatcagtcacaccaaggcttcaataaggaacacacaagcaagatggtaagcgctattgttttatatgtgcttttggcggcggcggcgcattctgcctttgcggcggatcccggggacaagatctgtatcggctaccagaccaacaatagcaccgagaccgtgaatacactgagcgagcagaacgtgcctgtgacacaggtggaagagctggtgcacagaggcatcgatcctatcctgtgtggcacagagctgggatctcctctggtgctggacgattgttctctggagggcctgatcctgggcaaccccaagtgtgacctgtacctgaacggccgcgagtggagctacatcgtggagaggcccaaggaaatggagggcgtgtgttaccctggcagcatcgagaatcaggaggagctgaggagcctgttcagcagcatcaagaaatacgagcgggtgaagatgttcgacttcaccaagtggaacgtgacctacaccggcacaagcaaggcctgtaacaacaccagcaaccagggcagcttctacagatccatgagatggctgaccctgaagagcggacagtttcccgtgcagaccgacgagtacaagaacacccgggacagcgacatcgtgtttacctgggccattcaccaccctcctaccagcgatgagcaggtgaagctgtacaagaaccctgacaccctgagcagcgtgacaaccgtggagatcaaccggagcttcaagcccaatatcggccctagacctctggtgagaggccagcagggcagaatggattactactgggccgtgctgaaacctggccagaccgtgaagatccagaccaacggcaatctgatcgcccctgagtatggccacctgatcacaggcaagagccacggcagaatcctgaagaacaacctgcctatgggccagtgtgtgaccgagtgccagctgaatgagggcgtgatgaacacctccaagcccttccagaataccagcaagcactacatcggcaagtgccccaagtacatccctagcggcagcctgaaactggccatcggcctgagaaatgtgcctcagagggagaccagaggactgtttggagccatcgccggattcatcgaaggaggatggcctggactggtcgccggatggtatggattccagcaccagaatgccgagggaacaggaattgccgccgacagagactctacacagcgggccatcgacaacatgcagaacaagctgaacaacgtgatcgacaagatgaacaagcagttcgaggtggtgaaccacgagtttagcgaggtggagagccggatcaacatgatcaacagcaagatcgacgaccagatcacagacatctgggcctacaatgccgaactgctggtgctgctggagaaccagaaaaccctggacgagcacgacgccaatgtgagaaacctgcacgacagagtgaggagagtgctgagggagaacgccatcgatacaggcgatggctgcttcgagatcctgcacaagtgtgacaacaactgtatggacaccatccggaacggcacctacaaccacaaggagtacgaggaggagtccaagatcgagcggcagaaagtgaatagcggcagactggtgcctagaggatctcctggcagcggatatattcctgaggcccctagagatggacaggcctatgtgagaaaggatggcgaatgggtgctgctgtctacatttctgggacaccaccatcaccaccattgatgagcggccgctgcagatctgatcctttcctgggacccggcaagaaccaaaaactcactctcttcaaggaaatccgtaatgttaaacccgacacgatgaagcttgtcgttggatggaaaggaaaagagttctacagggaaacttggacccgcttcatggaagacagcttccccattgttaacgaccaagaagtgatggatgttttccttgttgtcaacatgcgtcccactagacccaaccgttgttacaaattcctggcccaacacgctctgcgttgcgaccccgactatgtacctcatgacgtgattaggatcgtcgagccttcatgggtgggcagcaacaacgagtaccgcatcagcctggctaagaagggcggcggctgcccaataatgaaccttcactctgagtacaccaactcgttcgaacagttcatcgatcgtgtcatctgggagaacttctacaagcccatcgtttacatcggtaccgactctgctgaagaggaggaaattctccttgaagtttccctggtgttcaaagtaaaggagtttgcaccagacgcacctctgttcactggtccggcgtattaaaacacgatacattgttattagtacatttattaagcgctagattctgtgcgttgttgatttacagacaattgttgtacgtattttaataattcattaaatttataatctttagggtggtatgttagagcgaaaatcaaatgattttcagcgtctttatatctgaatttaaatattaaatcctcaatagatttgtaaaataggtttcgattagtttcaaacaagggttgtttttccgaaccgatggctggactatctaatggattttcgctcaacgccacaaaacttgccaaatcttgtagcagcaatctagctttgtcgatattcgtttgtgttttgttttgtaataaaggttcgacgtcgttcaaaatattatgcgcttttgtatttctttcatcactgtcgttagtgtacaattgactcgacgtaaacacgttaaataaagcttggacatatttaacatcgggcgtgttagctttattaggccgattatcgtcgtcgtcccaaccctcgtcgttagaagttgcttccgaagacgattttgccatagccacacgacgcctattaattgtgtcggctaacacgtccgcgatcaaatttgtagttgagctttttggaattatttctgattgcgggcgtttttgggcgggtttcaatctaactgtgcccgattttaattcagacaacacgttagaaagcgatggtgcaggcggtggtaacatttcagacggcaaatctactaatggcggcggtggtggagctgatgataaatctaccatcggtggaggcgcaggcggggctggcggcggaggcggaggcggaggtggtggcggtgatgcagacggcggtttaggctcaaatgtctctttaggcaacacagtcggcacctcaactattgtactggtttcgggcgccgtttttggtttgaccggtctgagacgagtgcgatttttttcgtttctaatagcttccaacaattgttgtctgtcgtctaaaggtgcagcgggttgaggttccgtcggcattggtggagcgggcggcaattcagacatcgatggtggtggtggtggtggaggcgctggaatgttaggcacgggagaaggtggtggcggcggtgccgccggtataatttgttctggtttagtttgttcgcgcacgattgtgggcaccggcgcaggcgccgctggctgcacaacggaaggtcgtctgcttcgaggcagcgcttggggtggtggcaattcaatattataattggaatacaaatcgtaaaaatctgctataagcattgtaatttcgctatcgtttaccgtgccgatatttaacaaccgctcaatgtaagcaattgtattgtaaagagattgtctcaagctccgcacgccgataacaagccttttcatttttactacagcattgtagtggcgagacacttcgctgtcgtcgacgtacatgtatgctttgttgtcaaaaacgtcgttggcaagctttaaaatatttaaaagaacatctctgttcagcaccactgtgttgtcgtaaatgttgtttttgataatttgcgcttccgcagtatcgacacgttcaaaaaattgatgcgcatcaattttgttgttcctattattgaataaataagattgtacagattcatatctacgattcgtcatggccaccacaaatgctacgctgcaaacgctggtacaattttacgaaaactgcaaaaacgtcaaaactcggtataaaataatcaacgggcgctttggcaaaatatctattttatcgcacaagcccactagcaaattgtatttgcagaaaacaatttcggcgcacaattttaacgctgacgaaataaaagttcaccagttaatgagcgaccacccaaattttataaaaatctattttaatcacggttccatcaacaaccaagtgatcgtgatggactacattgactgtcccgatttatttgaaacactacaaattaaaggcgagctttcgtaccaacttgttagcaatattattagacagctgtgtgaagcgctcaacgatttgcacaagcacaatttcatacacaacgacataaaactcgaaaatgtcttatatttcgaagcacttgatcgcgtgtatgtttgcgattacggattgtgcaaacacgaaaactcacttagcgtgcacgacggcacgttggagtattttagtccggaaaaaattcgacacacaactatgcacgtttcgtttgactggtacgcggcgtgttaacatacaagttgctaaccggcggttcgtaatcatggtcatagctgtttcctgtgtgaaattgttatccgctcacaattccacacaacatacgagccggaagcataaagtgtaaagcctggggtgcctaatgagtgagctaactcacattaattgcgttgcgctcactgcccgctttccagtcgggaaacctgtcgtgccagctgcattaatgaatcggccaacgcgcggggagaggcggtttgcgtattgggcgctcttccgcttcctcgctcactgactcgctgcgctcggtcgttcggctgcggcgagcggtatcagctcactcaaaggcggtaatacggttatccacagaatcaggggataacgcaggaaagaacatgtgagcaaaaggccagcaaaaggccaggaaccgtaaaaaggccgcgttgctggcgtttttccataggctccgcccccctgacgagcatcacaaaaatcgacgctcaagtcagaggtggcgaaacccgacaggactataaagataccaggcgtttccccctggaagctccctcgtgcgctctcctgttccgaccctgccgcttaccggatacctgtccgcctttctcccttcgggaagcgtggcgctttctcatagctcacgctgtaggtatctcagttcggtgtaggtcgttcgctccaagctgggctgtgtgcacgaaccccccgttcagcccgaccgctgcgccttatccggtaactatcgtcttgagtccaacccggtaagacacgacttatcgccactggcagcagccactggtaacaggattagcagagcgaggtatgtaggcggtgctacagagttcttgaagtggtggcctaactacggctacactagaaggacagtatttggtatctgcgctctgctgaagccagttaccttcggaaaaagagttggtagctcttgatccggcaaacaaaccaccgctggtagcggtggtttttttgtttgcaagcagcagattacgcgcagaaaaaaaggatctcaagaagatcctttgatcttttctacggggtctgacgctcagtggaacgaaaactcacgttaagggattttggtcatgagattatcaaaaaggatcttcacctagatccttttaaattaaaaatgaagttttaaatcaatctaaagtatatatgagtaaacttggtctgacagttaccaatgcttaatcagtgaggcacctatctcagcgatctgtctatttcgttcatccatagttgcctgactccccgtcgtgtagataactacgatacgggagggcttaccatctggccccagtgctgcaatgataccgcgagacccacgctcaccggctccagatttatcagcaataaaccagccagccggaagggccgagcgcagaagtggtcctgcaactttatccgcctccatccagtctattaattgttgccgggaagctagagtaagtagttcgccagttaatagtttgcgcaacgttgttgccattgctacaggcatcgtggtgtcacgctcgtcgtttggtatggcttcattcagctccggttcccaacgatcaaggcgagttacatgatcccccatgttgtgcaaaaaagcggttagctccttcggtcctccgatcgttgtcagaagtaagttggccgcagtgttatcactcatggttatggcagcactgcataattctcttactgtcatgccatccgtaagatgcttttctgtgactggtgagtactcaaccaagtcattctgagaatagtgtatgcggcgaccgagttgctcttgcccggcgtcaatacgggataataccgcgccacatagcagaactttaaaagtgctcatcattggaaaacgttcttcggggcgaaaactctcaaggatcttaccgctgttgagatccagttcgatgtaacccactcgtgcacccaactgatcttcagcatcttttactttcaccagcgtttctgggtgagcaaaaacaggaaggcaaaatgccgcaaaaaagggaataagggcgacacggaaatgttgaatactcatactcttcctttttcaatattattgaagcatttatcagggttattgtctcatgagcggatacatatttgaatgtatttagaaaaataaacaaataggggttccgcgcacatttccccgaaaagtgccacctgacgtctaagaaaccattattatcatgacattaacctataaaaataggcgtatcacgaggccctttcgtctcgcgcgtttcggtgatgacggtgaaaacctctgacacatgcagctcccggagacggtcacagcttgtctgtaagcggatgccgggagcagacaagcccgtcagggcgcgtcagcgggtgttggcgggtgtcggggctggcttaactatgcggcatcagagcagattgtactgagagtgcaccatatgcggtgtgaaataccgcacagatgcgtaaggagaaaataccgcatcaggcgccattcgccattcaggctgcgcaactgttgggaagggcgatcggtgcgggcctcttcgctattacgccagctggcgaaagggggatgtgctgcaaggcgattaagttgggtaacgccagggttttcccagtcacgacgttgtaaaacgacggccagtgcc

SEQ ID NO: 47 - DNA, 11401 bp, Artificial Sequence
  Plasmid DNA: 53515
aagctttactcgtaaagcgagttgaaggatcatatttagttgcgtttatgagataagattgaaagcacgtgtaaaatgtttcccgcgcgttggcacaactatttacaatgcggccaagttataaaagattctaatctgatatgttttaaaacacctttgcggcccgagttgtttgcgtacgtgactagcgaagaagatgtgtggaccgcagaacagatagtaaaacaaaaccctagtattggagcaataatcgatttaaccaacacgtctaaatattatgatggtgtgcattttttgcgggcgggcctgttatacaaaaaaattcaagtacctggccagactttgccgcctgaaagcatagttcaagaatttattgacacggtaaaagaatttacagaaaagtgtcccggcatgttggtgggcgtgcactgcacacacggtattaatcgcaccggttacatggtgtgcagatatttaatgcacaccctgggtattgcgccgcaggaagccatagatagattcgaaaaagccagaggtcacaaaattgaaagacaaaattacgttcaagatttattaatttaattaatattatttgcattctttaacaaatactttatcctattttcaaattgttgcgcttcttccagcgaaccaaaactatgcttcgcttgctccgtttagcttgtagccgatcagtggcgttgttccaatcgacggtaggattaggccggatattctccaccacaatgttggcaacgttgatgttacgtttatgcttttggttttccacgtacgtcttttggccggtaatagccgtaaacgtagtgccgtcgcgcgtcacgcacaacaccggatgtttgcgcttgtccgcggggtattgaaccgcgcgatccgacaaatccaccactttggcaactaaatcggtgacctgcgcgtcttttttctgcattatttcgtctttcttttgcatggtttcctggaagccggtgtacatgcggtttagatcagtcatgacgcgcgtgacctgcaaatctttggcctcgatctgcttgtccttgatggcaacgatgcgttcaataaactcttgttttttaacaagttcctcggttttttgcgccaccaccgcttgcagcgcgtttgtgtgctcggtgaatgtcgcaatcagcttagtcaccaactgtttgctctcctcctcccgttgtttgatcgcgggatcgtacttgccggtgcagagcacttgaggaattacttcttctaaaagccattcttgtaattctatggcgtaaggcaatttggacttcataatcagctgaatcacgccggatttagtaatgagcactgtatgcggctgcaaatacagcgggtcgccccttttcacgacgctgttagaggtagggcccccattttggatggtctgctcaaataacgatttgtatttattgtctacatgaacacgtatagctttatcacaaactgtatattttaaactgttagcgacgtccttggccacgaaccggacctgttggtcgcgctctagcacgtaccgcaggttgaacgtatcttctccaaatttaaattctccaattttaacgcgagccattttgatacacgtgtgtcgattttgcaacaactattgttttttaacgcaaactaaacttattgtggtaagcaataattaaatatgggggaacatgcgccgctacaacactcgtcgttatgaacgcagacggcgccggtctcggcgcaagcggctaaaacgtgttgcgcgttcaacgcggcaaacatcgcaaaagccaatagtacagttttgatttgcatattaacggcgattttttaaattatcttatttaataaatagttatgacgcctacaactccccgcccgcgttgactcgctgcacctcgagcagttcgttgacgccttcctccgtgtggccgaacacgtcgagcgggtggtcgatgaccagcggcgtgccgcacgcgacgcacaagtatctgtacaccgaatgatcgtcgggcgaaggcacgtcggcctccaagtggcaatattggcaaattcgaaaatatatacagttgggttgtttgcgcatatctatcgtggcgttgggcatgtacgtccgaacgttgatttgcatgcaagccgaaattaaatcattgcgattagtgcgattaaaacgttgtacatcctcgcttttaatcatgccgtcgattaaatcgcgcaatcgagtcaagtgatcaaagtgtggaataatgttttctttgtattcccgagtcaagcgcagcgcgtattttaacaaactagccatcttgtaagttagtttcatttaatgcaactttatccaataatatattatgtatcgcacgtcaagaattaacaatgcgcccgttgtcgcatctcaacacgactatgatagagatcaaataaagcgcgaattaaatagcttgcgacgcaacgtgcacgatctgtgcacgcgttccggcacgagctttgattgtaataagtttttacgaagcgatgacatgacccccgtagtgacaacgatcacgcccaaaagaactgccgactacaaaattaccgagtatgtcggtgacgttaaaactattaagccatccaatcgaccgttagtcgaatcaggaccgctggtgcgagaagccgcgaagtatggcgaatgcatcgtataacgtgtggagtccgctcattagagcgtcatgtttagacaagaaagctacatatttaattgatcccgatgattttattgataaattgaccctaactccatacacggtattctacaatggcggggttttggtcaaaatttccggactgcgattgtacatgctgttaacggctccgcccactattaatgaaattaaaaattccaattttaaaaaacgcagcaagagaaacatttgtatgaaagaatgcgtagaaggaaagaaaaatgtcgtcgacatgctgaacaacaagattaatatgcctccgtgtataaaaaaaatattgaacgatttgaaagaaaacaatgtaccgcgcggcggtatgtacaggaagaggtttatactaaactgttacattgcaaacgtggtttcgtgtgccaagtgtgaaaaccgatgtttaatcaaggctctgacgcatttctacaaccacgactccaagtgtgtgggtgaagtcatgcatcttttaatcaaatcccaagatgtgtataaaccaccaaactgccaaaaaatgaaaactgtcgacaagctctgtccgtttgctggcaactgcaagggtctcaatcctatttgtaattattgaataataaaacaattataaatgctaaatttgttttttattaacgatacaaaccaaacgcaacaagaacatttgtagtattatctataattgaaaacgcgtagttataatcgctgaggtaatatttaaaatcattttcaaatgattcacagttaatttgcgacaatataattttattttcacataaactagacgccttgtcgtcttcttcttcgtattccttctctttttcatttttctcctcataaaaattaacatagttattatcgtatccatatatgtatctatcgtatagagtaaattttttgttgtcataaatatatatgtcttttttaatggggtgtatagtaccgctgcgcatagtttttctgtaatttacaacagtgctattttctggtagttcttcggagtgtgttgctttaattattaaatttatataatcaatgaatttgggatcgtcggttttgtacaatatgttgccggcatagtacgcagcttcttctagttcaattacaccattttttagcagcaccggattaacataactttccaaaatgttgtacgaaccgttaaacaaaaacagttcacctcccttttctatactattgtctgcgagcagttgtttgttgttaaaaataacagccattgtaatgagacgcacaaactaatatcacaaactggaaatgtctatcaatatatagttgctgatatcatggagataattaaaatgataaccatctcgcaaataaataagtattttactgttttcgtaacagttttgtaataaaaaaacctataaatattccggattattcataccgtcccaccatcgggcgcggatctatgctactagtaaatcagtcacaccaaggcttcaataaggaacacacaagcaagatggtaagcgctattgttttatatgtgcttttggcggcggcggcgcattctgcctttgcggcggatcccgggagccagatcaccaatggcaccaccggcaaccctatcatctgtctgggacaccacgccgtggagaatggcaccagcgtgaaaaccctgaccgacaaccatgtggaagtggtgtctgccaaggaactggtggagaccaaccacaccgatgagctgtgtcctagccctctgaaactggtggatggccaggattgccacctgatcaatggcgccctgggatctcctggatgtgacaggctgcaggacaccacctgggatgtgttcatcgagagacccaccgccgtggatacctgctaccccttcgacgtgcctgattaccagagcctgaggagcattctggccagctctggcagcctggagtttatcgccgagcagttcacctggaatggcgtgaaagtggatggcagcagctctgcctgtctgagaggcggcaggaacagcttcttcagcaggctgaactggctgaccaaggccaccaacggcaattacggccccatcaacgtgaccaaggagaacacaggcagctatgtgagactgtatctgtggggagtgcaccaccctagcagcgataacgagcagaccgacctgtataaggtggccaccggcagagtgacagtgagcaccaggagcgaccagatcagcatcgtgcccaacatcggcagcagacccagagtgagaaaccagagcggcaggatcagcatctactggaccctggtgaatcctggcgacagcatcatcttcaacagcatcggcaacctgattgctcctaggggacactacaagatcagcaagagcaccaagtccaccgtgctgaagagcgacaagagaatcggcagctgtaccagcccttgcctgacagataagggcagcatccagtccgataagcccttccagaacgtgtccagaatcgccatcggcaactgccctaagtatgtgaagcagggctctctgatgctggccacaggcatgagaaacatcccccagagagagaccagaggactgtttggagccatcgccggattcatcgagaatggctggcagggactgatcgatggctggtacggcttcagacaccagaatgccgagggaacaggaacagccgccgatctgaagtctacacaggccgctattgaccagatcaacggcaagctgaaccggctgatcgagaaaaccaacgagaagtaccaccagatcgagaaggaattcgagcaggtggagggcagaatccaggacctggagaagtacgtggaggacaccaagatcgacctgtggagctacaatgccgaactgctggtggccctggagaatcagcacaccatcgacgtgaccgacagcgagatgaacaagctgttcgagagagtgaggaggcagctgagagagaacgccgaggatcagggcaatggctgcttcgagatcttccaccagtgtgacaacaactgtatcgagagcatccggaacggcacctacgaccacaacatctacagggacgaggccatcaacaaccggatcaagatcaacagcggcagactggtgcctagaggatctcctggcagcggatatattcctgaggcccctagagatggacaggcctatgtgagaaaggatggcgaatgggtgctgctgtctacatttctgggacaccaccatcaccaccattgatgagcggccgctgcagatctgatcctttcctgggacccggcaagaaccaaaaactcactctcttcaaggaaatccgtaatgttaaacccgacacgatgaagcttgtcgttggatggaaaggaaaagagttctacagggaaacttggacccgcttcatggaagacagcttccccattgttaacgaccaagaagtgatggatgttttccttgttgtcaacatgcgtcccactagacccaaccgttgttacaaattcctggcccaacacgctctgcgttgcgaccccgactatgtacctcatgacgtgattaggatcgtcgagccttcatgggtgggcagcaacaacgagtaccgcatcagcctggctaagaagggcggcggctgcccaataatgaaccttcactctgagtacaccaactcgttcgaacagttcatcgatcgtgtcatctgggagaacttctacaagcccatcgtttacatcggtaccgactctgctgaagaggaggaaattctccttgaagtttccctggtgttcaaagtaaaggagtttgcaccagacgcacctctgttcactggtccggcgtattaaaacacgatacattgttattagtacatttattaagcgctagattctgtgcgttgttgatttacagacaattgttgtacgtattttaataattcattaaatttataatctttagggtggtatgttagagcgaaaatcaaatgattttcagcgtctttatatctgaatttaaatattaaatcctcaatagatttgtaaaataggtttcgattagtttcaaacaagggttgtttttccgaaccgatggctggactatctaatggattttcgctcaacgccacaaaacttgccaaatcttgtagcagcaatctagctttgtcgatattcgtttgtgttttgttttgtaataaaggttcgacgtcgttcaaaatattatgcgcttttgtatttctttcatcactgtcgttagtgtacaattgactcgacgtaaacacgttaaataaagcttggacatatttaacatcgggcgtgttagctttattaggccgattatcgtcgtcgtcccaaccctcgtcgttagaagttgcttccgaagacgattttgccatagccacacgacgcctattaattgtgtcggctaacacgtccgcgatcaaatttgtagttgagctttttggaattatttctgattgcgggcgtttttgggcgggtttcaatctaactgtgcccgattttaattcagacaacacgttagaaagcgatggtgcaggcggtggtaacatttcagacggcaaatctactaatggcggcggtggtggagctgatgataaatctaccatcggtggaggcgcaggcggggctggcggcggaggcggaggcggaggtggtggcggtgatgcagacggcggtttaggctcaaatgtctctttaggcaacacagtcggcacctcaactattgtactggtttcgggcgccgtttttggtttgaccggtctgagacgagtgcgatttttttcgtttctaatagcttccaacaattgttgtctgtcgtctaaaggtgcagcgggttgaggttccgtcggcattggtggagcgggcggcaattcagacatcgatggtggtggtggtggtggaggcgctggaatgttaggcacgggagaaggtggtggcggcggtgccgccggtataatttgttctggtttagtttgttcgcgcacgattgtgggcaccggcgcaggcgccgctggctgcacaacggaaggtcgtctgcttcgaggcagcgcttggggtggtggcaattcaatattataattggaatacaaatcgtaaaaatctgctataagcattgtaatttcgctatcgtttaccgtgccgatatttaacaaccgctcaatgtaagcaattgtattgtaaagagattgtctcaagctccgcacgccgataacaagccttttcatttttactacagcattgtagtggcgagacacttcgctgtcgtcgacgtacatgtatgctttgttgtcaaaaacgtcgttggcaagctttaaaatatttaaaagaacatctctgttcagcaccactgtgttgtcgtaaatgttgtttttgataatttgcgcttccgcagtatcgacacgttcaaaaaattgatgcgcatcaattttgttgttcctattattgaataaataagattgtacagattcatatctacgattcgtcatggccaccacaaatgctacgctgcaaacgctggtacaattttacgaaaactgcaaaaacgtcaaaactcggtataaaataatcaacgggcgctttggcaaaatatctattttatcgcacaagcccactagcaaattgtatttgcagaaaacaatttcggcgcacaattttaacgctgacgaaataaaagttcaccagttaatgagcgaccacccaaattttataaaaatctattttaatcacggttccatcaacaaccaagtgatcgtgatggactacattgactgtcccgatttatttgaaacactacaaattaaaggcgagctttcgtaccaacttgttagcaatattattagacagctgtgtgaagcgctcaacgatttgcacaagcacaatttcatacacaacgacataaaactcgaaaatgtcttatatttcgaagcacttgatcgcgtgtatgtttgcgattacggattgtgcaaacacgaaaactcacttagcgtgcacgacggcacgttggagtattttagtccggaaaaaattcgacacacaactatgcacgtttcgtttgactggtacgcggcgtgttaacatacaagttgctaaccggcggttcgtaatcatggtcatagctgtttcctgtgtgaaattgttatccgctcacaattccacacaacatacgagccggaagcataaagtgtaaagcctggggtgcctaatgagtgagctaactcacattaattgcgttgcgctcactgcccgctttccagtcgggaaacctgtcgtgccagctgcattaatgaatcggccaacgcgcggggagaggcggtttgcgtattgggcgctcttccgcttcctcgctcactgactcgctgcgctcggtcgttcggctgcggcgagcggtatcagctcactcaaaggcggtaatacggttatccacagaatcaggggataacgcaggaaagaacatgtgagcaaaaggccagcaaaaggccaggaaccgtaaaaaggccgcgttgctggcgtttttccataggctccgcccccctgacgagcatcacaaaaatcgacgctcaagtcagaggtggcgaaacccgacaggactataaagataccaggcgtttccccctggaagctccctcgtgcgctctcctgttccgaccctgccgcttaccggatacctgtccgcctttctcccttcgggaagcgtggcgctttctcatagctcacgctgtaggtatctcagttcggtgtaggtcgttcgctccaagctgggctgtgtgcacgaaccccccgttcagcccgaccgctgcgccttatccggtaactatcgtcttgagtccaacccggtaagacacgacttatcgccactggcagcagccactggtaacaggattagcagagcgaggtatgtaggcggtgctacagagttcttgaagtggtggcctaactacggctacactagaaggacagtatttggtatctgcgctctgctgaagccagttaccttcggaaaaagagttggtagctcttgatccggcaaacaaaccaccgctggtagcggtggtttttttgtttgcaagcagcagattacgcgcagaaaaaaaggatctcaagaagatcctttgatcttttctacggggtctgacgctcagtggaacgaaaactcacgttaagggattttggtcatgagattatcaaaaaggatcttcacctagatccttttaaattaaaaatgaagttttaaatcaatctaaagtatatatgagtaaacttggtctgacagttaccaatgcttaatcagtgaggcacctatctcagcgatctgtctatttcgttcatccatagttgcctgactccccgtcgtgtagataactacgatacgggagggcttaccatctggccccagtgctgcaatgataccgcgagacccacgctcaccggctccagatttatcagcaataaaccagccagccggaagggccgagcgcagaagtggtcctgcaactttatccgcctccatccagtctattaattgttgccgggaagctagagtaagtagttcgccagttaatagtttgcgcaacgttgttgccattgctacaggcatcgtggtgtcacgctcgtcgtttggtatggcttcattcagctccggttcccaacgatcaaggcgagttacatgatcccccatgttgtgcaaaaaagcggttagctccttcggtcctccgatcgttgtcagaagtaagttggccgcagtgttatcactcatggttatggcagcactgcataattctcttactgtcatgccatccgtaagatgcttttctgtgactggtgagtactcaaccaagtcattctgagaatagtgtatgcggcgaccgagttgctcttgcccggcgtcaatacgggataataccgcgccacatagcagaactttaaaagtgctcatcattggaaaacgttcttcggggcgaaaactctcaaggatcttaccgctgttgagatccagttcgatgtaacccactcgtgcacccaactgatcttcagcatcttttactttcaccagcgtttctgggtgagcaaaaacaggaaggcaaaatgccgcaaaaaagggaataagggcgacacggaaatgttgaatactcatactcttcctttttcaatattattgaagcatttatcagggttattgtctcatgagcggatacatatttgaatgtatttagaaaaataaacaaataggggttccgcgcacatttccccgaaaagtgccacctgacgtctaagaaaccattattatcatgacattaacctataaaaataggcgtatcacgaggccctttcgtctcgcgcgtttcggtgatgacggtgaaaacctctgacacatgcagctcccggagacggtcacagcttgtctgtaagcggatgccgggagcagacaagcccgtcagggcgcgtcagcgggtgttggcgggtgtcggggctggcttaactatgcggcatcagagcagattgtactgagagtgcaccatatgcggtgtgaaataccgcacagatgcgtaaggagaaaataccgcatcaggcgccattcgccattcaggctgcgcaactgttgggaagggcgatcggtgcgggcctcttcgctattacgccagctggcgaaagggggatgtgctgcaaggcgattaagttgggtaacgccagggttttcccagtcacgacgttgtaaaacgacggccagtgcc

SEQ ID NO: 48 - DNA, 11422 bp, Artificial Sequence
  Plasmid DNA: 54567
aagctttactcgtaaagcgagttgaaggatcatatttagttgcgtttatgagataagattgaaagcacgtgtaaaatgtttcccgcgcgttggcacaactatttacaatgcggccaagttataaaagattctaatctgatatgttttaaaacacctttgcggcccgagttgtttgcgtacgtgactagcgaagaagatgtgtggaccgcagaacagatagtaaaacaaaaccctagtattggagcaataatcgatttaaccaacacgtctaaatattatgatggtgtgcattttttgcgggcgggcctgttatacaaaaaaattcaagtacctggccagactttgccgcctgaaagcatagttcaagaatttattgacacggtaaaagaatttacagaaaagtgtcccggcatgttggtgggcgtgcactgcacacacggtattaatcgcaccggttacatggtgtgcagatatttaatgcacaccctgggtattgcgccgcaggaagccatagatagattcgaaaaagccagaggtcacaaaattgaaagacaaaattacgttcaagatttattaatttaattaatattatttgcattctttaacaaatactttatcctattttcaaattgttgcgcttcttccagcgaaccaaaactatgcttcgcttgctccgtttagcttgtagccgatcagtggcgttgttccaatcgacggtaggattaggccggatattctccaccacaatgttggcaacgttgatgttacgtttatgcttttggttttccacgtacgtcttttggccggtaatagccgtaaacgtagtgccgtcgcgcgtcacgcacaacaccggatgtttgcgcttgtccgcggggtattgaaccgcgcgatccgacaaatccaccactttggcaactaaatcggtgacctgcgcgtcttttttctgcattatttcgtctttcttttgcatggtttcctggaagccggtgtacatgcggtttagatcagtcatgacgcgcgtgacctgcaaatctttggcctcgatctgcttgtccttgatggcaacgatgcgttcaataaactcttgttttttaacaagttcctcggttttttgcgccaccaccgcttgcagcgcgtttgtgtgctcggtgaatgtcgcaatcagcttagtcaccaactgtttgctctcctcctcccgttgtttgatcgcgggatcgtacttgccggtgcagagcacttgaggaattacttcttctaaaagccattcttgtaattctatggcgtaaggcaatttggacttcataatcagctgaatcacgccggatttagtaatgagcactgtatgcggctgcaaatacagcgggtcgccccttttcacgacgctgttagaggtagggcccccattttggatggtctgctcaaataacgatttgtatttattgtctacatgaacacgtatagctttatcacaaactgtatattttaaactgttagcgacgtccttggccacgaaccggacctgttggtcgcgctctagcacgtaccgcaggttgaacgtatcttctccaaatttaaattctccaattttaacgcgagccattttgatacacgtgtgtcgattttgcaacaactattgttttttaacgcaaactaaacttattgtggtaagcaataattaaatatgggggaacatgcgccgctacaacactcgtcgttatgaacgcagacggcgccggtctcggcgcaagcggctaaaacgtgttgcgcgttcaacgcggcaaacatcgcaaaagccaatagtacagttttgatttgcatattaacggcgattttttaaattatcttatttaataaatagttatgacgcctacaactccccgcccgcgttgactcgctgcacctcgagcagttcgttgacgccttcctccgtgtggccgaacacgtcgagcgggtggtcgatgaccagcggcgtgccgcacgcgacgcacaagtatctgtacaccgaatgatcgtcgggcgaaggcacgtcggcctccaagtggcaatattggcaaattcgaaaatatatacagttgggttgtttgcgcatatctatcgtggcgttgggcatgtacgtccgaacgttgatttgcatgcaagccgaaattaaatcattgcgattagtgcgattaaaacgttgtacatcctcgcttttaatcatgccgtcgattaaatcgcgcaatcgagtcaagtgatcaaagtgtggaataatgttttctttgtattcccgagtcaagcgcagcgcgtattttaacaaactagccatcttgtaagttagtttcatttaatgcaactttatccaataatatattatgtatcgcacgtcaagaattaacaatgcgcccgttgtcgcatctcaacacgactatgatagagatcaaataaagcgcgaattaaatagcttgcgacgcaacgtgcacgatctgtgcacgcgttccggcacgagctttgattgtaataagtttttacgaagcgatgacatgacccccgtagtgacaacgatcacgcccaaaagaactgccgactacaaaattaccgagtatgtcggtgacgttaaaactattaagccatccaatcgaccgttagtcgaatcaggaccgctggtgcgagaagccgcgaagtatggcgaatgcatcgtataacgtgtggagtccgctcattagagcgtcatgtttagacaagaaagctacatatttaattgatcccgatgattttattgataaattgaccctaactccatacacggtattctacaatggcggggttttggtcaaaatttccggactgcgattgtacatgctgttaacggctccgcccactattaatgaaattaaaaattccaattttaaaaaacgcagcaagagaaacatttgtatgaaagaatgcgtagaaggaaagaaaaatgtcgtcgacatgctgaacaacaagattaatatgcctccgtgtataaaaaaaatattgaacgatttgaaagaaaacaatgtaccgcgcggcggtatgtacaggaagaggtttatactaaactgttacattgcaaacgtggtttcgtgtgccaagtgtgaaaaccgatgtttaatcaaggctctgacgcatttctacaaccacgactccaagtgtgtgggtgaagtcatgcatcttttaatcaaatcccaagatgtgtataaaccaccaaactgccaaaaaatgaaaactgtcgacaagctctgtccgtttgctggcaactgcaagggtctcaatcctatttgtaattattgaataataaaacaattataaatgctaaatttgttttttattaacgatacaaaccaaacgcaacaagaacatttgtagtattatctataattgaaaacgcgtagttataatcgctgaggtaatatttaaaatcattttcaaatgattcacagttaatttgcgacaatataattttattttcacataaactagacgccttgtcgtcttcttcttcgtattccttctctttttcatttttctcctcataaaaattaacatagttattatcgtatccatatatgtatctatcgtatagagtaaattttttgttgtcataaatatatatgtcttttttaatggggtgtatagtaccgctgcgcatagtttttctgtaatttacaacagtgctattttctggtagttcttcggagtgtgttgctttaattattaaatttatataatcaatgaatttgggatcgtcggttttgtacaatatgttgccggcatagtacgcagcttcttctagttcaattacaccattttttagcagcaccggattaacataactttccaaaatgttgtacgaaccgttaaacaaaaacagttcacctcccttttctatactattgtctgcgagcagttgtttgttgttaaaaataacagccattgtaatgagacgcacaaactaatatcacaaactggaaatgtctatcaatatatagttgctgatatcatggagataattaaaatgataaccatctcgcaaataaataagtattttactgttttcgtaacagttttgtaataaaaaaacctataaatattccggattattcataccgtcccaccatcgggcgcggatctatgctactagtaaatcagtcacaccaaggcttcaataaggaacacacaagcaagatggtaagcgctattgttttatatgtgcttttggcggcggcggcgcattctgcctttgcggcggatcccggggatcagatctgtattggctaccacgccaacaattctacagagcaggtggacaccatcatggagaaaaacgtgacagtgacacacgctcaggacatcctggagaaaacccacaatggcaagctgtgtgatctggatggagtgaagcctctgatcctgagagattgttctgtggctggatggctgctgggaaaccctatgtgtgacgagttcatcaatgtgcctgagtggagctatatcgtggagaaggccaaccctgtgaatgatctgtgttaccccggcgacttcaatgattacgaggagctgaagcacctgctgtccagaatcaaccacttcgagaagatccagatcatccctaagtctagctggtctagccatgaagcttctctgggagtgtctagcgcttgtccctatcagagaaagagcagcttcttcagaaatgtggtgtggctgatcaagaagaacagcacctaccccacaatcaagcggagctacaacaacaccaaccaggaagatctgctggtcctgtggggaattcaccatcctaatgatgccgccgagcagacaaagctgtaccagaaccccaccacatatatctctgtgggcaccagcacactgaatcagagactggtgcctagaatcgccacaagatccaaggtgaacggccagtctggcagaatggagttcttctggaccatcctgaagccaaacgacgccatcaacttcgagagcaacggcaatttcatcgcccctgagtacgcctataagatcgtgaagaagggcgatagcaccatcatgaagagcgagctggagtacggcaactgtaataccaagtgccagacacctatgggcgccatcaatagctctatgcccttccacaatatccaccctctgacaatcggcgagtgtcctaagtacgtgaagagcaacagactggtgctggctacaggcctgagaaatagccctcagagagagacaagaggactgtttggagccatcgccggattcattgaagggggatggcagggaatggtcgatggctggtatggctatcaccacagcaatgagcagggatctggatatgccgccgataaggagtctacacagaaggccatcgacggcgtcacaaacaaggtgaacagcatcatcgacaagatgaacacccagtttgaggctgtgggcagagagttcaacaacctggagcggagaatcgagaacctgaacaagaagatggaggacggctttctggatgtgtggacctataatgccgaactgctggtgctgatggagaacgagagaaccctggatttccacgacagcaacgtgaagaacctgtacgacaaagtgagactgcagctgagagataatgccaaggaactgggcaatggctgcttcgagttctaccacaagtgtgacaacgagtgtatggagtctgtgagaaacggcacctacgattaccctcagtactctgaggaagccagactgaagcgcgaggagatctctggcgtgaagctggagagcatcggcatctatcagatctctggaaggctggtgccaagaggatctcctggcagcggatatattcctgaggcccctagagatggacaggcctatgtgagaaaggatggcgaatgggtgctgctgtctacatttctgggacaccaccaccatcaccattgatgagcggccgctgcagatctgatcctttcctgggacccggcaagaaccaaaaactcactctcttcaaggaaatccgtaatgttaaacccgacacgatgaagcttgtcgttggatggaaaggaaaagagttctacagggaaacttggacccgcttcatggaagacagcttccccattgttaacgaccaagaagtgatggatgttttccttgttgtcaacatgcgtcccactagacccaaccgttgttacaaattcctggcccaacacgctctgcgttgcgaccccgactatgtacctcatgacgtgattaggatcgtcgagccttcatgggtgggcagcaacaacgagtaccgcatcagcctggctaagaagggcggcggctgcccaataatgaaccttcactctgagtacaccaactcgttcgaacagttcatcgatcgtgtcatctgggagaacttctacaagcccatcgtttacatcggtaccgactctgctgaagaggaggaaattctccttgaagtttccctggtgttcaaagtaaaggagtttgcaccagacgcacctctgttcactggtccggcgtattaaaacacgatacattgttattagtacatttattaagcgctagattctgtgcgttgttgatttacagacaattgttgtacgtattttaataattcattaaatttataatctttagggtggtatgttagagcgaaaatcaaatgattttcagcgtctttatatctgaatttaaatattaaatcctcaatagatttgtaaaataggtttcgattagtttcaaacaagggttgtttttccgaaccgatggctggactatctaatggattttcgctcaacgccacaaaacttgccaaatcttgtagcagcaatctagctttgtcgatattcgtttgtgttttgttttgtaataaaggttcgacgtcgttcaaaatattatgcgcttttgtatttctttcatcactgtcgttagtgtacaattgactcgacgtaaacacgttaaataaagcttggacatatttaacatcgggcgtgttagctttattaggccgattatcgtcgtcgtcccaaccctcgtcgttagaagttgcttccgaagacgattttgccatagccacacgacgcctattaattgtgtcggctaacacgtccgcgatcaaatttgtagttgagctttttggaattatttctgattgcgggcgtttttgggcgggtttcaatctaactgtgcccgattttaattcagacaacacgttagaaagcgatggtgcaggcggtggtaacatttcagacggcaaatctactaatggcggcggtggtggagctgatgataaatctaccatcggtggaggcgcaggcggggctggcggcggaggcggaggcggaggtggtggcggtgatgcagacggcggtttaggctcaaatgtctctttaggcaacacagtcggcacctcaactattgtactggtttcgggcgccgtttttggtttgaccggtctgagacgagtgcgatttttttcgtttctaatagcttccaacaattgttgtctgtcgtctaaaggtgcagcgggttgaggttccgtcggcattggtggagcgggcggcaattcagacatcgatggtggtggtggtggtggaggcgctggaatgttaggcacgggagaaggtggtggcggcggtgccgccggtataatttgttctggtttagtttgttcgcgcacgattgtgggcaccggcgcaggcgccgctggctgcacaacggaaggtcgtctgcttcgaggcagcgcttggggtggtggcaattcaatattataattggaatacaaatcgtaaaaatctgctataagcattgtaatttcgctatcgtttaccgtgccgatatttaacaaccgctcaatgtaagcaattgtattgtaaagagattgtctcaagctccgcacgccgataacaagccttttcatttttactacagcattgtagtggcgagacacttcgctgtcgtcgacgtacatgtatgctttgttgtcaaaaacgtcgttggcaagctttaaaatatttaaaagaacatctctgttcagcaccactgtgttgtcgtaaatgttgtttttgataatttgcgcttccgcagtatcgacacgttcaaaaaattgatgcgcatcaattttgttgttcctattattgaataaataagattgtacagattcatatctacgattcgtcatggccaccacaaatgctacgctgcaaacgctggtacaattttacgaaaactgcaaaaacgtcaaaactcggtataaaataatcaacgggcgctttggcaaaatatctattttatcgcacaagcccactagcaaattgtatttgcagaaaacaatttcggcgcacaattttaacgctgacgaaataaaagttcaccagttaatgagcgaccacccaaattttataaaaatctattttaatcacggttccatcaacaaccaagtgatcgtgatggactacattgactgtcccgatttatttgaaacactacaaattaaaggcgagctttcgtaccaacttgttagcaatattattagacagctgtgtgaagcgctcaacgatttgcacaagcacaatttcatacacaacgacataaaactcgaaaatgtcttatatttcgaagcacttgatcgcgtgtatgtttgcgattacggattgtgcaaacacgaaaactcacttagcgtgcacgacggcacgttggagtattttagtccggaaaaaattcgacacacaactatgcacgtttcgtttgactggtacgcggcgtgttaacatacaagttgctaaccggcggttcgtaatcatggtcatagctgtttcctgtgtgaaattgttatccgctcacaattccacacaacatacgagccggaagcataaagtgtaaagcctggggtgcctaatgagtgagctaactcacattaattgcgttgcgctcactgcccgctttccagtcgggaaacctgtcgtgccagctgcattaatgaatcggccaacgcgcggggagaggcggtttgcgtattgggcgctcttccgcttcctcgctcactgactcgctgcgctcggtcgttcggctgcggcgagcggtatcagctcactcaaaggcggtaatacggttatccacagaatcaggggataacgcaggaaagaacatgtgagcaaaaggccagcaaaaggccaggaaccgtaaaaaggccgcgttgctggcgtttttccataggctccgcccccctgacgagcatcacaaaaatcgacgctcaagtcagaggtggcgaaacccgacaggactataaagataccaggcgtttccccctggaagctccctcgtgcgctctcctgttccgaccctgccgcttaccggatacctgtccgcctttctcccttcgggaagcgtggcgctttctcatagctcacgctgtaggtatctcagttcggtgtaggtcgttcgctccaagctgggctgtgtgcacgaaccccccgttcagcccgaccgctgcgccttatccggtaactatcgtcttgagtccaacccggtaagacacgacttatcgccactggcagcagccactggtaacaggattagcagagcgaggtatgtaggcggtgctacagagttcttgaagtggtggcctaactacggctacactagaaggacagtatttggtatctgcgctctgctgaagccagttaccttcggaaaaagagttggtagctcttgatccggcaaacaaaccaccgctggtagcggtggtttttttgtttgcaagcagcagattacgcgcagaaaaaaaggatctcaagaagatcctttgatcttttctacggggtctgacgctcagtggaacgaaaactcacgttaagggattttggtcatgagattatcaaaaaggatcttcacctagatccttttaaattaaaaatgaagttttaaatcaatctaaagtatatatgagtaaacttggtctgacagttaccaatgcttaatcagtgaggcacctatctcagcgatctgtctatttcgttcatccatagttgcctgactccccgtcgtgtagataactacgatacgggagggcttaccatctggccccagtgctgcaatgataccgcgagacccacgctcaccggctccagatttatcagcaataaaccagccagccggaagggccgagcgcagaagtggtcctgcaactttatccgcctccatccagtctattaattgttgccgggaagctagagtaagtagttcgccagttaatagtttgcgcaacgttgttgccattgctacaggcatcgtggtgtcacgctcgtcgtttggtatggcttcattcagctccggttcccaacgatcaaggcgagttacatgatcccccatgttgtgcaaaaaagcggttagctccttcggtcctccgatcgttgtcagaagtaagttggccgcagtgttatcactcatggttatggcagcactgcataattctcttactgtcatgccatccgtaagatgcttttctgtgactggtgagtactcaaccaagtcattctgagaatagtgtatgcggcgaccgagttgctcttgcccggcgtcaatacgggataataccgcgccacatagcagaactttaaaagtgctcatcattggaaaacgttcttcggggcgaaaactctcaaggatcttaccgctgttgagatccagttcgatgtaacccactcgtgcacccaactgatcttcagcatcttttactttcaccagcgtttctgggtgagcaaaaacaggaaggcaaaatgccgcaaaaaagggaataagggcgacacggaaatgttgaatactcatactcttcctttttcaatattattgaagcatttatcagggttattgtctcatgagcggatacatatttgaatgtatttagaaaaataaacaaataggggttccgcgcacatttccccgaaaagtgccacctgacgtctaagaaaccattattatcatgacattaacctataaaaataggcgtatcacgaggccctttcgtctcgcgcgtttcggtgatgacggtgaaaacctctgacacatgcagctcccggagacggtcacagcttgtctgtaagcggatgccgggagcagacaagcccgtcagggcgcgtcagcgggtgttggcgggtgtcggggctggcttaactatgcggcatcagagcagattgtactgagagtgcaccatatgcggtgtgaaataccgcacagatgcgtaaggagaaaataccgcatcaggcgccattcgccattcaggctgcgcaactgttgggaagggcgatcggtgcgggcctcttcgctattacgccagctggcgaaagggggatgtgctgcaaggcgattaagttgggtaacgccagggttttcccagtcacgacgttgtaaaacgacggccagtgcc

SEQ ID NO: 49 - DNA, 11383 bp, Artificial Sequence
  Plasmid DNA: 54568
aagctttactcgtaaagcgagttgaaggatcatatttagttgcgtttatgagataagattgaaagcacgtgtaaaatgtttcccgcgcgttggcacaactatttacaatgcggccaagttataaaagattctaatctgatatgttttaaaacacctttgcggcccgagttgtttgcgtacgtgactagcgaagaagatgtgtggaccgcagaacagatagtaaaacaaaaccctagtattggagcaataatcgatttaaccaacacgtctaaatattatgatggtgtgcattttttgcgggcgggcctgttatacaaaaaaattcaagtacctggccagactttgccgcctgaaagcatagttcaagaatttattgacacggtaaaagaatttacagaaaagtgtcccggcatgttggtgggcgtgcactgcacacacggtattaatcgcaccggttacatggtgtgcagatatttaatgcacaccctgggtattgcgccgcaggaagccatagatagattcgaaaaagccagaggtcacaaaattgaaagacaaaattacgttcaagatttattaatttaattaatattatttgcattctttaacaaatactttatcctattttcaaattgttgcgcttcttccagcgaaccaaaactatgcttcgcttgctccgtttagcttgtagccgatcagtggcgttgttccaatcgacggtaggattaggccggatattctccaccacaatgttggcaacgttgatgttacgtttatgcttttggttttccacgtacgtcttttggccggtaatagccgtaaacgtagtgccgtcgcgcgtcacgcacaacaccggatgtttgcgcttgtccgcggggtattgaaccgcgcgatccgacaaatccaccactttggcaactaaatcggtgacctgcgcgtcttttttctgcattatttcgtctttcttttgcatggtttcctggaagccggtgtacatgcggtttagatcagtcatgacgcgcgtgacctgcaaatctttggcctcgatctgcttgtccttgatggcaacgatgcgttcaataaactcttgttttttaacaagttcctcggttttttgcgccaccaccgcttgcagcgcgtttgtgtgctcggtgaatgtcgcaatcagcttagtcaccaactgtttgctctcctcctcccgttgtttgatcgcgggatcgtacttgccggtgcagagcacttgaggaattacttcttctaaaagccattcttgtaattctatggcgtaaggcaatttggacttcataatcagctgaatcacgccggatttagtaatgagcactgtatgcggctgcaaatacagcgggtcgccccttttcacgacgctgttagaggtagggcccccattttggatggtctgctcaaataacgatttgtatttattgtctacatgaacacgtatagctttatcacaaactgtatattttaaactgttagcgacgtccttggccacgaaccggacctgttggtcgcgctctagcacgtaccgcaggttgaacgtatcttctccaaatttaaattctccaattttaacgcgagccattttgatacacgtgtgtcgattttgcaacaactattgttttttaacgcaaactaaacttattgtggtaagcaataattaaatatgggggaacatgcgccgctacaacactcgtcgttatgaacgcagacggcgccggtctcggcgcaagcggctaaaacgtgttgcgcgttcaacgcggcaaacatcgcaaaagccaatagtacagttttgatttgcatattaacggcgattttttaaattatcttatttaataaatagttatgacgcctacaactccccgcccgcgttgactcgctgcacctcgagcagttcgttgacgccttcctccgtgtggccgaacacgtcgagcgggtggtcgatgaccagcggcgtgccgcacgcgacgcacaagtatctgtacaccgaatgatcgtcgggcgaaggcacgtcggcctccaagtggcaatattggcaaattcgaaaatatatacagttgggttgtttgcgcatatctatcgtggcgttgggcatgtacgtccgaacgttgatttgcatgcaagccgaaattaaatcattgcgattagtgcgattaaaacgttgtacatcctcgcttttaatcatgccgtcgattaaatcgcgcaatcgagtcaagtgatcaaagtgtggaataatgttttctttgtattcccgagtcaagcgcagcgcgtattttaacaaactagccatcttgtaagttagtttcatttaatgcaactttatccaataatatattatgtatcgcacgtcaagaattaacaatgcgcccgttgtcgcatctcaacacgactatgatagagatcaaataaagcgcgaattaaatagcttgcgacgcaacgtgcacgatctgtgcacgcgttccggcacgagctttgattgtaataagtttttacgaagcgatgacatgacccccgtagtgacaacgatcacgcccaaaagaactgccgactacaaaattaccgagtatgtcggtgacgttaaaactattaagccatccaatcgaccgttagtcgaatcaggaccgctggtgcgagaagccgcgaagtatggcgaatgcatcgtataacgtgtggagtccgctcattagagcgtcatgtttagacaagaaagctacatatttaattgatcccgatgattttattgataaattgaccctaactccatacacggtattctacaatggcggggttttggtcaaaatttccggactgcgattgtacatgctgttaacggctccgcccactattaatgaaattaaaaattccaattttaaaaaacgcagcaagagaaacatttgtatgaaagaatgcgtagaaggaaagaaaaatgtcgtcgacatgctgaacaacaagattaatatgcctccgtgtataaaaaaaatattgaacgatttgaaagaaaacaatgtaccgcgcggcggtatgtacaggaagaggtttatactaaactgttacattgcaaacgtggtttcgtgtgccaagtgtgaaaaccgatgtttaatcaaggctctgacgcatttctacaaccacgactccaagtgtgtgggtgaagtcatgcatcttttaatcaaatcccaagatgtgtataaaccaccaaactgccaaaaaatgaaaactgtcgacaagctctgtccgtttgctggcaactgcaagggtctcaatcctatttgtaattattgaataataaaacaattataaatgctaaatttgttttttattaacgatacaaaccaaacgcaacaagaacatttgtagtattatctataattgaaaacgcgtagttataatcgctgaggtaatatttaaaatcattttcaaatgattcacagttaatttgcgacaatataattttattttcacataaactagacgccttgtcgtcttcttcttcgtattccttctctttttcatttttctcctcataaaaattaacatagttattatcgtatccatatatgtatctatcgtatagagtaaattttttgttgtcataaatatatatgtcttttttaatggggtgtatagtaccgctgcgcatagtttttctgtaatttacaacagtgctattttctggtagttcttcggagtgtgttgctttaattattaaatttatataatcaatgaatttgggatcgtcggttttgtacaatatgttgccggcatagtacgcagcttcttctagttcaattacaccattttttagcagcaccggattaacataactttccaaaatgttgtacgaaccgttaaacaaaaacagttcacctcccttttctatactattgtctgcgagcagttgtttgttgttaaaaataacagccattgtaatgagacgcacaaactaatatcacaaactggaaatgtctatcaatatatagttgctgatatcatggagataattaaaatgataaccatctcgcaaataaataagtattttactgttttcgtaacagttttgtaataaaaaaacctataaatattccggattattcataccgtcccaccatcgggcgcggatctatgctactagtaaatcagtcacaccaaggcttcaataaggaacacacaagcaagatggtaagcgctattgttttatatgtgcttttggcggcggcggcgcattctgcctttgcggcggatcccggggatcagatctgtattggctaccacgccaacaattctacagagcaggtggacaccatcatggagaaaaacgtgacagtgacacacgctcaggacatcctggagaaaacccacaatggcaagctgtgtgatctggatggagtgaagcctctgatcctgagagattgttctgtggctggatggctgctgggaaaccctatgtgtgacgagttcatcaatgtgcctgagtggagctatatcgtggagaaggccaaccctgtgaatgatctgtgttaccccggcgacttcaatgattacgaggagctgaagcacctgctgtccagaatcaaccacttcgagaagatccagatcatccctaagtctagctggtctagccatgaagcttctctgggagtgtctagcgcttgtccctatcagagaaagagcagcttcttcagaaatgtggtgtggctgatcaagaagaacagcacctaccccacaatcaagcggagctacaacaacaccaaccaggaagatctgctggtcctgtggggaattcaccatcctaatgatgccgccgagcagacaaagctgtaccagaaccccaccacatatatctctgtgggcaccagcacactgaatcagagactggtgcctagaatcgccacaagatccaaggtgaacggccagtctggcagaatggagttcttctggaccatcctgaagccaaacgacgccatcaacttcgagagcaacggcaatttcatcgcccctgagtacgcctataagatcgtgaagaagggcgatagcaccatcatgaagagcgagctggagtacggcaactgtaataccaagtgccagacacctatgggcgccatcaatagctctatgcccttccacaatatccaccctctgacaatcggcgagtgtcctaagtacgtgaagagcaacagactggtgctggctacaggcctgagaaatagccctcagagagagacaagaggactgtttggagccatcgccggattcattgaagggggatggcagggaatggtcgatggctggtatggctatcaccacagcaatgagcagggatctggatatgccgccgataaggagtctacacagaaggccatcgacggcgtcacaaacaaggtgaacagcatcatcgacaagatgaacacccagtttgaggctgtgggcagagagttcaacaacctggagcggagaatcgagaacctgaacaagaagatggaggacggctttctggatgtgtggacctataatgccgaactgctggtgctgatggagaacgagagaaccctggatttccacgacagcaacgtgaagaacctgtacgacaaagtgagactgcagctgagagataatgccaaggaactgggcaatggctgcttcgagttctaccacaagtgtgacaacgagtgtatggagtctgtgagaaacggcacctacgattaccctcagtactctgaggaagccagactgaagcgcgaggagatctctggaaggctggtgccaagaggatctcctggcagcggatatattcctgaggcccctagagatggacaggcctatgtgagaaaggatggcgaatgggtgctgctgtctacatttctgggacaccaccaccatcaccattgatgagcggccgctgcagatctgatcctttcctgggacccggcaagaaccaaaaactcactctcttcaaggaaatccgtaatgttaaacccgacacgatgaagcttgtcgttggatggaaaggaaaagagttctacagggaaacttggacccgcttcatggaagacagcttccccattgttaacgaccaagaagtgatggatgttttccttgttgtcaacatgcgtcccactagacccaaccgttgttacaaattcctggcccaacacgctctgcgttgcgaccccgactatgtacctcatgacgtgattaggatcgtcgagccttcatgggtgggcagcaacaacgagtaccgcatcagcctggctaagaagggcggcggctgcccaataatgaaccttcactctgagtacaccaactcgttcgaacagttcatcgatcgtgtcatctgggagaacttctacaagcccatcgtttacatcggtaccgactctgctgaagaggaggaaattctccttgaagtttccctggtgttcaaagtaaaggagtttgcaccagacgcacctctgttcactggtccggcgtattaaaacacgatacattgttattagtacatttattaagcgctagattctgtgcgttgttgatttacagacaattgttgtacgtattttaataattcattaaatttataatctttagggtggtatgttagagcgaaaatcaaatgattttcagcgtctttatatctgaatttaaatattaaatcctcaatagatttgtaaaataggtttcgattagtttcaaacaagggttgtttttccgaaccgatggctggactatctaatggattttcgctcaacgccacaaaacttgccaaatcttgtagcagcaatctagctttgtcgatattcgtttgtgttttgttttgtaataaaggttcgacgtcgttcaaaatattatgcgcttttgtatttctttcatcactgtcgttagtgtacaattgactcgacgtaaacacgttaaataaagcttggacatatttaacatcgggcgtgttagctttattaggccgattatcgtcgtcgtcccaaccctcgtcgttagaagttgcttccgaagacgattttgccatagccacacgacgcctattaattgtgtcggctaacacgtccgcgatcaaatttgtagttgagctttttggaattatttctgattgcgggcgtttttgggcgggtttcaatctaactgtgcccgattttaattcagacaacacgttagaaagcgatggtgcaggcggtggtaacatttcagacggcaaatctactaatggcggcggtggtggagctgatgataaatctaccatcggtggaggcgcaggcggggctggcggcggaggcggaggcggaggtggtggcggtgatgcagacggcggtttaggctcaaatgtctctttaggcaacacagtcggcacctcaactattgtactggtttcgggcgccgtttttggtttgaccggtctgagacgagtgcgatttttttcgtttctaatagcttccaacaattgttgtctgtcgtctaaaggtgcagcgggttgaggttccgtcggcattggtggagcgggcggcaattcagacatcgatggtggtggtggtggtggaggcgctggaatgttaggcacgggagaaggtggtggcggcggtgccgccggtataatttgttctggtttagtttgttcgcgcacgattgtgggcaccggcgcaggcgccgctggctgcacaacggaaggtcgtctgcttcgaggcagcgcttggggtggtggcaattcaatattataattggaatacaaatcgtaaaaatctgctataagcattgtaatttcgctatcgtttaccgtgccgatatttaacaaccgctcaatgtaagcaattgtattgtaaagagattgtctcaagctccgcacgccgataacaagccttttcatttttactacagcattgtagtggcgagacacttcgctgtcgtcgacgtacatgtatgctttgttgtcaaaaacgtcgttggcaagctttaaaatatttaaaagaacatctctgttcagcaccactgtgttgtcgtaaatgttgtttttgataatttgcgcttccgcagtatcgacacgttcaaaaaattgatgcgcatcaattttgttgttcctattattgaataaataagattgtacagattcatatctacgattcgtcatggccaccacaaatgctacgctgcaaacgctggtacaattttacgaaaactgcaaaaacgtcaaaactcggtataaaataatcaacgggcgctttggcaaaatatctattttatcgcacaagcccactagcaaattgtatttgcagaaaacaatttcggcgcacaattttaacgctgacgaaataaaagttcaccagttaatgagcgaccacccaaattttataaaaatctattttaatcacggttccatcaacaaccaagtgatcgtgatggactacattgactgtcccgatttatttgaaacactacaaattaaaggcgagctttcgtaccaacttgttagcaatattattagacagctgtgtgaagcgctcaacgatttgcacaagcacaatttcatacacaacgacataaaactcgaaaatgtcttatatttcgaagcacttgatcgcgtgtatgtttgcgattacggattgtgcaaacacgaaaactcacttagcgtgcacgacggcacgttggagtattttagtccggaaaaaattcgacacacaactatgcacgtttcgtttgactggtacgcggcgtgttaacatacaagttgctaaccggcggttcgtaatcatggtcatagctgtttcctgtgtgaaattgttatccgctcacaattccacacaacatacgagccggaagcataaagtgtaaagcctggggtgcctaatgagtgagctaactcacattaattgcgttgcgctcactgcccgctttccagtcgggaaacctgtcgtgccagctgcattaatgaatcggccaacgcgcggggagaggcggtttgcgtattgggcgctcttccgcttcctcgctcactgactcgctgcgctcggtcgttcggctgcggcgagcggtatcagctcactcaaaggcggtaatacggttatccacagaatcaggggataacgcaggaaagaacatgtgagcaaaaggccagcaaaaggccaggaaccgtaaaaaggccgcgttgctggcgtttttccataggctccgcccccctgacgagcatcacaaaaatcgacgctcaagtcagaggtggcgaaacccgacaggactataaagataccaggcgtttccccctggaagctccctcgtgcgctctcctgttccgaccctgccgcttaccggatacctgtccgcctttctcccttcgggaagcgtggcgctttctcatagctcacgctgtaggtatctcagttcggtgtaggtcgttcgctccaagctgggctgtgtgcacgaaccccccgttcagcccgaccgctgcgccttatccggtaactatcgtcttgagtccaacccggtaagacacgacttatcgccactggcagcagccactggtaacaggattagcagagcgaggtatgtaggcggtgctacagagttcttgaagtggtggcctaactacggctacactagaaggacagtatttggtatctgcgctctgctgaagccagttaccttcggaaaaagagttggtagctcttgatccggcaaacaaaccaccgctggtagcggtggtttttttgtttgcaagcagcagattacgcgcagaaaaaaaggatctcaagaagatcctttgatcttttctacggggtctgacgctcagtggaacgaaaactcacgttaagggattttggtcatgagattatcaaaaaggatcttcacctagatccttttaaattaaaaatgaagttttaaatcaatctaaagtatatatgagtaaacttggtctgacagttaccaatgcttaatcagtgaggcacctatctcagcgatctgtctatttcgttcatccatagttgcctgactccccgtcgtgtagataactacgatacgggagggcttaccatctggccccagtgctgcaatgataccgcgagacccacgctcaccggctccagatttatcagcaataaaccagccagccggaagggccgagcgcagaagtggtcctgcaactttatccgcctccatccagtctattaattgttgccgggaagctagagtaagtagttcgccagttaatagtttgcgcaacgttgttgccattgctacaggcatcgtggtgtcacgctcgtcgtttggtatggcttcattcagctccggttcccaacgatcaaggcgagttacatgatcccccatgttgtgcaaaaaagcggttagctccttcggtcctccgatcgttgtcagaagtaagttggccgcagtgttatcactcatggttatggcagcactgcataattctcttactgtcatgccatccgtaagatgcttttctgtgactggtgagtactcaaccaagtcattctgagaatagtgtatgcggcgaccgagttgctcttgcccggcgtcaatacgggataataccgcgccacatagcagaactttaaaagtgctcatcattggaaaacgttcttcggggcgaaaactctcaaggatcttaccgctgttgagatccagttcgatgtaacccactcgtgcacccaactgatcttcagcatcttttactttcaccagcgtttctgggtgagcaaaaacaggaaggcaaaatgccgcaaaaaagggaataagggcgacacggaaatgttgaatactcatactcttcctttttcaatattattgaagcatttatcagggttattgtctcatgagcggatacatatttgaatgtatttagaaaaataaacaaataggggttccgcgcacatttccccgaaaagtgccacctgacgtctaagaaaccattattatcatgacattaacctataaaaataggcgtatcacgaggccctttcgtctcgcgcgtttcggtgatgacggtgaaaacctctgacacatgcagctcccggagacggtcacagcttgtctgtaagcggatgccgggagcagacaagcccgtcagggcgcgtcagcgggtgttggcgggtgtcggggctggcttaactatgcggcatcagagcagattgtactgagagtgcaccatatgcggtgtgaaataccgcacagatgcgtaaggagaaaataccgcatcaggcgccattcgccattcaggctgcgcaactgttgggaagggcgatcggtgcgggcctcttcgctattacgccagctggcgaaagggggatgtgctgcaaggcgattaagttgggtaacgccagggttttcccagtcacgacgttgtaaaacgacggccagtgcc

SEQ ID NO: 50 - DNA, 11452 bp, Artificial Sequence
  Plasmid DNA: 54569
aagctttactcgtaaagcgagttgaaggatcatatttagttgcgtttatgagataagattgaaagcacgtgtaaaatgtttcccgcgcgttggcacaactatttacaatgcggccaagttataaaagattctaatctgatatgttttaaaacacctttgcggcccgagttgtttgcgtacgtgactagcgaagaagatgtgtggaccgcagaacagatagtaaaacaaaaccctagtattggagcaataatcgatttaaccaacacgtctaaatattatgatggtgtgcattttttgcgggcgggcctgttatacaaaaaaattcaagtacctggccagactttgccgcctgaaagcatagttcaagaatttattgacacggtaaaagaatttacagaaaagtgtcccggcatgttggtgggcgtgcactgcacacacggtattaatcgcaccggttacatggtgtgcagatatttaatgcacaccctgggtattgcgccgcaggaagccatagatagattcgaaaaagccagaggtcacaaaattgaaagacaaaattacgttcaagatttattaatttaattaatattatttgcattctttaacaaatactttatcctattttcaaattgttgcgcttcttccagcgaaccaaaactatgcttcgcttgctccgtttagcttgtagccgatcagtggcgttgttccaatcgacggtaggattaggccggatattctccaccacaatgttggcaacgttgatgttacgtttatgcttttggttttccacgtacgtcttttggccggtaatagccgtaaacgtagtgccgtcgcgcgtcacgcacaacaccggatgtttgcgcttgtccgcggggtattgaaccgcgcgatccgacaaatccaccactttggcaactaaatcggtgacctgcgcgtcttttttctgcattatttcgtctttcttttgcatggtttcctggaagccggtgtacatgcggtttagatcagtcatgacgcgcgtgacctgcaaatctttggcctcgatctgcttgtccttgatggcaacgatgcgttcaataaactcttgttttttaacaagttcctcggttttttgcgccaccaccgcttgcagcgcgtttgtgtgctcggtgaatgtcgcaatcagcttagtcaccaactgtttgctctcctcctcccgttgtttgatcgcgggatcgtacttgccggtgcagagcacttgaggaattacttcttctaaaagccattcttgtaattctatggcgtaaggcaatttggacttcataatcagctgaatcacgccggatttagtaatgagcactgtatgcggctgcaaatacagcgggtcgccccttttcacgacgctgttagaggtagggcccccattttggatggtctgctcaaataacgatttgtatttattgtctacatgaacacgtatagctttatcacaaactgtatattttaaactgttagcgacgtccttggccacgaaccggacctgttggtcgcgctctagcacgtaccgcaggttgaacgtatcttctccaaatttaaattctccaattttaacgcgagccattttgatacacgtgtgtcgattttgcaacaactattgttttttaacgcaaactaaacttattgtggtaagcaataattaaatatgggggaacatgcgccgctacaacactcgtcgttatgaacgcagacggcgccggtctcggcgcaagcggctaaaacgtgttgcgcgttcaacgcggcaaacatcgcaaaagccaatagtacagttttgatttgcatattaacggcgattttttaaattatcttatttaataaatagttatgacgcctacaactccccgcccgcgttgactcgctgcacctcgagcagttcgttgacgccttcctccgtgtggccgaacacgtcgagcgggtggtcgatgaccagcggcgtgccgcacgcgacgcacaagtatctgtacaccgaatgatcgtcgggcgaaggcacgtcggcctccaagtggcaatattggcaaattcgaaaatatatacagttgggttgtttgcgcatatctatcgtggcgttgggcatgtacgtccgaacgttgatttgcatgcaagccgaaattaaatcattgcgattagtgcgattaaaacgttgtacatcctcgcttttaatcatgccgtcgattaaatcgcgcaatcgagtcaagtgatcaaagtgtggaataatgttttctttgtattcccgagtcaagcgcagcgcgtattttaacaaactagccatcttgtaagttagtttcatttaatgcaactttatccaataatatattatgtatcgcacgtcaagaattaacaatgcgcccgttgtcgcatctcaacacgactatgatagagatcaaataaagcgcgaattaaatagcttgcgacgcaacgtgcacgatctgtgcacgcgttccggcacgagctttgattgtaataagtttttacgaagcgatgacatgacccccgtagtgacaacgatcacgcccaaaagaactgccgactacaaaattaccgagtatgtcggtgacgttaaaactattaagccatccaatcgaccgttagtcgaatcaggaccgctggtgcgagaagccgcgaagtatggcgaatgcatcgtataacgtgtggagtccgctcattagagcgtcatgtttagacaagaaagctacatatttaattgatcccgatgattttattgataaattgaccctaactccatacacggtattctacaatggcggggttttggtcaaaatttccggactgcgattgtacatgctgttaacggctccgcccactattaatgaaattaaaaattccaattttaaaaaacgcagcaagagaaacatttgtatgaaagaatgcgtagaaggaaagaaaaatgtcgtcgacatgctgaacaacaagattaatatgcctccgtgtataaaaaaaatattgaacgatttgaaagaaaacaatgtaccgcgcggcggtatgtacaggaagaggtttatactaaactgttacattgcaaacgtggtttcgtgtgccaagtgtgaaaaccgatgtttaatcaaggctctgacgcatttctacaaccacgactccaagtgtgtgggtgaagtcatgcatcttttaatcaaatcccaagatgtgtataaaccaccaaactgccaaaaaatgaaaactgtcgacaagctctgtccgtttgctggcaactgcaagggtctcaatcctatttgtaattattgaataataaaacaattataaatgctaaatttgttttttattaacgatacaaaccaaacgcaacaagaacatttgtagtattatctataattgaaaacgcgtagttataatcgctgaggtaatatttaaaatcattttcaaatgattcacagttaatttgcgacaatataattttattttcacataaactagacgccttgtcgtcttcttcttcgtattccttctctttttcatttttctcctcataaaaattaacatagttattatcgtatccatatatgtatctatcgtatagagtaaattttttgttgtcataaatatatatgtcttttttaatggggtgtatagtaccgctgcgcatagtttttctgtaatttacaacagtgctattttctggtagttcttcggagtgtgttgctttaattattaaatttatataatcaatgaatttgggatcgtcggttttgtacaatatgttgccggcatagtacgcagcttcttctagttcaattacaccattttttagcagcaccggattaacataactttccaaaatgttgtacgaaccgttaaacaaaaacagttcacctcccttttctatactattgtctgcgagcagttgtttgttgttaaaaataacagccattgtaatgagacgcacaaactaatatcacaaactggaaatgtctatcaatatatagttgctgatatcatggagataattaaaatgataaccatctcgcaaataaataagtattttactgttttcgtaacagttttgtaataaaaaaacctataaatattccggattattcataccgtcccaccatcgggcgcggatctatgctactagtaaatcagtcacaccaaggcttcaataaggaacacacaagcaagatggtaagcgctattgttttatatgtgcttttggcggcggcggcgcattctgcctttgcggcggatcccggggatcagatctgtattggctaccacgccaacaattctacagagcaggtggacaccatcatggagaaaaacgtgacagtgacacacgctcaggacatcctggagaaaacccacaatggcaagctgtgtgatctggatggagtgaagcctctgatcctgagagattgttctgtggctggatggctgctgggaaaccctatgtgtgacgagttcatcaatgtgcctgagtggagctatatcgtggagaaggccaaccctgtgaatgatctgtgttaccccggcgacttcaatgattacgaggagctgaagcacctgctgtccagaatcaaccacttcgagaagatccagatcatccctaagtctagctggtctagccatgaagcttctctgggagtgtctagcgcttgtccctatcagagaaagagcagcttcttcagaaatgtggtgtggctgatcaagaagaacagcacctaccccacaatcaagcggagctacaacaacaccaaccaggaagatctgctggtcctgtggggaattcaccatcctaatgatgccgccgagcagacaaagctgtaccagaaccccaccacatatatctctgtgggcaccagcacactgaatcagagactggtgcctagaatcgccacaagatccaaggtgaacggccagtctggcagaatggagttcttctggaccatcctgaagccaaacgacgccatcaacttcgagagcaacggcaatttcatcgcccctgagtacgcctataagatcgtgaagaagggcgatagcaccatcatgaagagcgagctggagtacggcaactgtaataccaagtgccagacacctatgggcgccatcaatagctctatgcccttccacaatatccaccctctgacaatcggcgagtgtcctaagtacgtgaagagcaacagactggtgctggctacaggcctgagaaatagccctcagagagagacaagaggactgtttggagccatcgccggattcattgaagggggatggcagggaatggtcgatggctggtatggctatcaccacagcaatgagcagggatctggatatgccgccgataaggagtctacacagaaggccatcgacggcgtcacaaacaaggtgaacagcatcatcgacaagatgaacacccagtttgaggctgtgggcagagagttcaacaacctggagcggagaatcgagaacctgaacaagaagatggaggacggctttctggatgtgtggacctataatgccgaactgctggtgctgatggagaacgagagaaccctggatttccacgacagcaacgtgaagaacctgtacgacaaagtgagactgcagctgagagataatgccaaggaactgggcaatggctgcttcgagttctaccacaagtgtgacaacgagtgtatggagtctgtgagaaacggcacctacgattaccctcagtactctgaggaagccagactgaagcgcgaggagatctctggcgtgaagctggagagcatcggcatctatcagatcggaggaggatctggaggaggaagtggctcttctggaaggctggtgccaagaggatctcctggcagcggatatattcctgaggcccctagagatggacaggcctatgtgagaaaggatggcgaatgggtgctgctgtctacatttctgggacaccaccaccatcaccattgatgagcggccgctgcagatctgatcctttcctgggacccggcaagaaccaaaaactcactctcttcaaggaaatccgtaatgttaaacccgacacgatgaagcttgtcgttggatggaaaggaaaagagttctacagggaaacttggacccgcttcatggaagacagcttccccattgttaacgaccaagaagtgatggatgttttccttgttgtcaacatgcgtcccactagacccaaccgttgttacaaattcctggcccaacacgctctgcgttgcgaccccgactatgtacctcatgacgtgattaggatcgtcgagccttcatgggtgggcagcaacaacgagtaccgcatcagcctggctaagaagggcggcggctgcccaataatgaaccttcactctgagtacaccaactcgttcgaacagttcatcgatcgtgtcatctgggagaacttctacaagcccatcgtttacatcggtaccgactctgctgaagaggaggaaattctccttgaagtttccctggtgttcaaagtaaaggagtttgcaccagacgcacctctgttcactggtccggcgtattaaaacacgatacattgttattagtacatttattaagcgctagattctgtgcgttgttgatttacagacaattgttgtacgtattttaataattcattaaatttataatctttagggtggtatgttagagcgaaaatcaaatgattttcagcgtctttatatctgaatttaaatattaaatcctcaatagatttgtaaaataggtttcgattagtttcaaacaagggttgtttttccgaaccgatggctggactatctaatggattttcgctcaacgccacaaaacttgccaaatcttgtagcagcaatctagctttgtcgatattcgtttgtgttttgttttgtaataaaggttcgacgtcgttcaaaatattatgcgcttttgtatttctttcatcactgtcgttagtgtacaattgactcgacgtaaacacgttaaataaagcttggacatatttaacatcgggcgtgttagctttattaggccgattatcgtcgtcgtcccaaccctcgtcgttagaagttgcttccgaagacgattttgccatagccacacgacgcctattaattgtgtcggctaacacgtccgcgatcaaatttgtagttgagctttttggaattatttctgattgcgggcgtttttgggcgggtttcaatctaactgtgcccgattttaattcagacaacacgttagaaagcgatggtgcaggcggtggtaacatttcagacggcaaatctactaatggcggcggtggtggagctgatgataaatctaccatcggtggaggcgcaggcggggctggcggcggaggcggaggcggaggtggtggcggtgatgcagacggcggtttaggctcaaatgtctctttaggcaacacagtcggcacctcaactattgtactggtttcgggcgccgtttttggtttgaccggtctgagacgagtgcgatttttttcgtttctaatagcttccaacaattgttgtctgtcgtctaaaggtgcagcgggttgaggttccgtcggcattggtggagcgggcggcaattcagacatcgatggtggtggtggtggtggaggcgctggaatgttaggcacgggagaaggtggtggcggcggtgccgccggtataatttgttctggtttagtttgttcgcgcacgattgtgggcaccggcgcaggcgccgctggctgcacaacggaaggtcgtctgcttcgaggcagcgcttggggtggtggcaattcaatattataattggaatacaaatcgtaaaaatctgctataagcattgtaatttcgctatcgtttaccgtgccgatatttaacaaccgctcaatgtaagcaattgtattgtaaagagattgtctcaagctccgcacgccgataacaagccttttcatttttactacagcattgtagtggcgagacacttcgctgtcgtcgacgtacatgtatgctttgttgtcaaaaacgtcgttggcaagctttaaaatatttaaaagaacatctctgttcagcaccactgtgttgtcgtaaatgttgtttttgataatttgcgcttccgcagtatcgacacgttcaaaaaattgatgcgcatcaattttgttgttcctattattgaataaataagattgtacagattcatatctacgattcgtcatggccaccacaaatgctacgctgcaaacgctggtacaattttacgaaaactgcaaaaacgtcaaaactcggtataaaataatcaacgggcgctttggcaaaatatctattttatcgcacaagcccactagcaaattgtatttgcagaaaacaatttcggcgcacaattttaacgctgacgaaataaaagttcaccagttaatgagcgaccacccaaattttataaaaatctattttaatcacggttccatcaacaaccaagtgatcgtgatggactacattgactgtcccgatttatttgaaacactacaaattaaaggcgagctttcgtaccaacttgttagcaatattattagacagctgtgtgaagcgctcaacgatttgcacaagcacaatttcatacacaacgacataaaactcgaaaatgtcttatatttcgaagcacttgatcgcgtgtatgtttgcgattacggattgtgcaaacacgaaaactcacttagcgtgcacgacggcacgttggagtattttagtccggaaaaaattcgacacacaactatgcacgtttcgtttgactggtacgcggcgtgttaacatacaagttgctaaccggcggttcgtaatcatggtcatagctgtttcctgtgtgaaattgttatccgctcacaattccacacaacatacgagccggaagcataaagtgtaaagcctggggtgcctaatgagtgagctaactcacattaattgcgttgcgctcactgcccgctttccagtcgggaaacctgtcgtgccagctgcattaatgaatcggccaacgcgcggggagaggcggtttgcgtattgggcgctcttccgcttcctcgctcactgactcgctgcgctcggtcgttcggctgcggcgagcggtatcagctcactcaaaggcggtaatacggttatccacagaatcaggggataacgcaggaaagaacatgtgagcaaaaggccagcaaaaggccaggaaccgtaaaaaggccgcgttgctggcgtttttccataggctccgcccccctgacgagcatcacaaaaatcgacgctcaagtcagaggtggcgaaacccgacaggactataaagataccaggcgtttccccctggaagctccctcgtgcgctctcctgttccgaccctgccgcttaccggatacctgtccgcctttctcccttcgggaagcgtggcgctttctcatagctcacgctgtaggtatctcagttcggtgtaggtcgttcgctccaagctgggctgtgtgcacgaaccccccgttcagcccgaccgctgcgccttatccggtaactatcgtcttgagtccaacccggtaagacacgacttatcgccactggcagcagccactggtaacaggattagcagagcgaggtatgtaggcggtgctacagagttcttgaagtggtggcctaactacggctacactagaaggacagtatttggtatctgcgctctgctgaagccagttaccttcggaaaaagagttggtagctcttgatccggcaaacaaaccaccgctggtagcggtggtttttttgtttgcaagcagcagattacgcgcagaaaaaaaggatctcaagaagatcctttgatcttttctacggggtctgacgctcagtggaacgaaaactcacgttaagggattttggtcatgagattatcaaaaaggatcttcacctagatccttttaaattaaaaatgaagttttaaatcaatctaaagtatatatgagtaaacttggtctgacagttaccaatgcttaatcagtgaggcacctatctcagcgatctgtctatttcgttcatccatagttgcctgactccccgtcgtgtagataactacgatacgggagggcttaccatctggccccagtgctgcaatgataccgcgagacccacgctcaccggctccagatttatcagcaataaaccagccagccggaagggccgagcgcagaagtggtcctgcaactttatccgcctccatccagtctattaattgttgccgggaagctagagtaagtagttcgccagttaatagtttgcgcaacgttgttgccattgctacaggcatcgtggtgtcacgctcgtcgtttggtatggcttcattcagctccggttcccaacgatcaaggcgagttacatgatcccccatgttgtgcaaaaaagcggttagctccttcggtcctccgatcgttgtcagaagtaagttggccgcagtgttatcactcatggttatggcagcactgcataattctcttactgtcatgccatccgtaagatgcttttctgtgactggtgagtactcaaccaagtcattctgagaatagtgtatgcggcgaccgagttgctcttgcccggcgtcaatacgggataataccgcgccacatagcagaactttaaaagtgctcatcattggaaaacgttcttcggggcgaaaactctcaaggatcttaccgctgttgagatccagttcgatgtaacccactcgtgcacccaactgatcttcagcatcttttactttcaccagcgtttctgggtgagcaaaaacaggaaggcaaaatgccgcaaaaaagggaataagggcgacacggaaatgttgaatactcatactcttcctttttcaatattattgaagcatttatcagggttattgtctcatgagcggatacatatttgaatgtatttagaaaaataaacaaataggggttccgcgcacatttccccgaaaagtgccacctgacgtctaagaaaccattattatcatgacattaacctataaaaataggcgtatcacgaggccctttcgtctcgcgcgtttcggtgatgacggtgaaaacctctgacacatgcagctcccggagacggtcacagcttgtctgtaagcggatgccgggagcagacaagcccgtcagggcgcgtcagcgggtgttggcgggtgtcggggctggcttaactatgcggcatcagagcagattgtactgagagtgcaccatatgcggtgtgaaataccgcacagatgcgtaaggagaaaataccgcatcaggcgccattcgccattcaggctgcgcaactgttgggaagggcgatcggtgcgggcctcttcgctattacgccagctggcgaaagggggatgtgctgcaaggcgattaagttgggtaacgccagggttttcccagtcacgacgttgtaaaacgacggccagtgcc

SEQ ID NO: 51 - DNA, 11407 bp, Artificial Sequence
  Plasmid DNA: 54570
aagctttactcgtaaagcgagttgaaggatcatatttagttgcgtttatgagataagattgaaagcacgtgtaaaatgtttcccgcgcgttggcacaactatttacaatgcggccaagttataaaagattctaatctgatatgttttaaaacacctttgcggcccgagttgtttgcgtacgtgactagcgaagaagatgtgtggaccgcagaacagatagtaaaacaaaaccctagtattggagcaataatcgatttaaccaacacgtctaaatattatgatggtgtgcattttttgcgggcgggcctgttatacaaaaaaattcaagtacctggccagactttgccgcctgaaagcatagttcaagaatttattgacacggtaaaagaatttacagaaaagtgtcccggcatgttggtgggcgtgcactgcacacacggtattaatcgcaccggttacatggtgtgcagatatttaatgcacaccctgggtattgcgccgcaggaagccatagatagattcgaaaaagccagaggtcacaaaattgaaagacaaaattacgttcaagatttattaatttaattaatattatttgcattctttaacaaatactttatcctattttcaaattgttgcgcttcttccagcgaaccaaaactatgcttcgcttgctccgtttagcttgtagccgatcagtggcgttgttccaatcgacggtaggattaggccggatattctccaccacaatgttggcaacgttgatgttacgtttatgcttttggttttccacgtacgtcttttggccggtaatagccgtaaacgtagtgccgtcgcgcgtcacgcacaacaccggatgtttgcgcttgtccgcggggtattgaaccgcgcgatccgacaaatccaccactttggcaactaaatcggtgacctgcgcgtcttttttctgcattatttcgtctttcttttgcatggtttcctggaagccggtgtacatgcggtttagatcagtcatgacgcgcgtgacctgcaaatctttggcctcgatctgcttgtccttgatggcaacgatgcgttcaataaactcttgttttttaacaagttcctcggttttttgcgccaccaccgcttgcagcgcgtttgtgtgctcggtgaatgtcgcaatcagcttagtcaccaactgtttgctctcctcctcccgttgtttgatcgcgggatcgtacttgccggtgcagagcacttgaggaattacttcttctaaaagccattcttgtaattctatggcgtaaggcaatttggacttcataatcagctgaatcacgccggatttagtaatgagcactgtatgcggctgcaaatacagcgggtcgccccttttcacgacgctgttagaggtagggcccccattttggatggtctgctcaaataacgatttgtatttattgtctacatgaacacgtatagctttatcacaaactgtatattttaaactgttagcgacgtccttggccacgaaccggacctgttggtcgcgctctagcacgtaccgcaggttgaacgtatcttctccaaatttaaattctccaattttaacgcgagccattttgatacacgtgtgtcgattttgcaacaactattgttttttaacgcaaactaaacttattgtggtaagcaataattaaatatgggggaacatgcgccgctacaacactcgtcgttatgaacgcagacggcgccggtctcggcgcaagcggctaaaacgtgttgcgcgttcaacgcggcaaacatcgcaaaagccaatagtacagttttgatttgcatattaacggcgattttttaaattatcttatttaataaatagttatgacgcctacaactccccgcccgcgttgactcgctgcacctcgagcagttcgttgacgccttcctccgtgtggccgaacacgtcgagcgggtggtcgatgaccagcggcgtgccgcacgcgacgcacaagtatctgtacaccgaatgatcgtcgggcgaaggcacgtcggcctccaagtggcaatattggcaaattcgaaaatatatacagttgggttgtttgcgcatatctatcgtggcgttgggcatgtacgtccgaacgttgatttgcatgcaagccgaaattaaatcattgcgattagtgcgattaaaacgttgtacatcctcgcttttaatcatgccgtcgattaaatcgcgcaatcgagtcaagtgatcaaagtgtggaataatgttttctttgtattcccgagtcaagcgcagcgcgtattttaacaaactagccatcttgtaagttagtttcatttaatgcaactttatccaataatatattatgtatcgcacgtcaagaattaacaatgcgcccgttgtcgcatctcaacacgactatgatagagatcaaataaagcgcgaattaaatagcttgcgacgcaacgtgcacgatctgtgcacgcgttccggcacgagctttgattgtaataagtttttacgaagcgatgacatgacccccgtagtgacaacgatcacgcccaaaagaactgccgactacaaaattaccgagtatgtcggtgacgttaaaactattaagccatccaatcgaccgttagtcgaatcaggaccgctggtgcgagaagccgcgaagtatggcgaatgcatcgtataacgtgtggagtccgctcattagagcgtcatgtttagacaagaaagctacatatttaattgatcccgatgattttattgataaattgaccctaactccatacacggtattctacaatggcggggttttggtcaaaatttccggactgcgattgtacatgctgttaacggctccgcccactattaatgaaattaaaaattccaattttaaaaaacgcagcaagagaaacatttgtatgaaagaatgcgtagaaggaaagaaaaatgtcgtcgacatgctgaacaacaagattaatatgcctccgtgtataaaaaaaatattgaacgatttgaaagaaaacaatgtaccgcgcggcggtatgtacaggaagaggtttatactaaactgttacattgcaaacgtggtttcgtgtgccaagtgtgaaaaccgatgtttaatcaaggctctgacgcatttctacaaccacgactccaagtgtgtgggtgaagtcatgcatcttttaatcaaatcccaagatgtgtataaaccaccaaactgccaaaaaatgaaaactgtcgacaagctctgtccgtttgctggcaactgcaagggtctcaatcctatttgtaattattgaataataaaacaattataaatgctaaatttgttttttattaacgatacaaaccaaacgcaacaagaacatttgtagtattatctataattgaaaacgcgtagttataatcgctgaggtaatatttaaaatcattttcaaatgattcacagttaatttgcgacaatataattttattttcacataaactagacgccttgtcgtcttcttcttcgtattccttctctttttcatttttctcctcataaaaattaacatagttattatcgtatccatatatgtatctatcgtatagagtaaattttttgttgtcataaatatatatgtcttttttaatggggtgtatagtaccgctgcgcatagtttttctgtaatttacaacagtgctattttctggtagttcttcggagtgtgttgctttaattattaaatttatataatcaatgaatttgggatcgtcggttttgtacaatatgttgccggcatagtacgcagcttcttctagttcaattacaccattttttagcagcaccggattaacataactttccaaaatgttgtacgaaccgttaaacaaaaacagttcacctcccttttctatactattgtctgcgagcagttgtttgttgttaaaaataacagccattgtaatgagacgcacaaactaatatcacaaactggaaatgtctatcaatatatagttgctgatatcatggagataattaaaatgataaccatctcgcaaataaataagtattttactgttttcgtaacagttttgtaataaaaaaacctataaatattccggattattcataccgtcccaccatcgggcgcggatctatgctactagtaaatcagtcacaccaaggcttcaataaggaacacacaagcaagatggtaagcgctattgttttatatgtgcttttggcggcggcggcgcattctgcctttgcggcggatcccggggatcagatctgtattggctaccacgccaacaattctacagagcaggtggacaccatcatggagaaaaacgtgacagtgacacacgctcaggacatcctggagaaaacccacaatggcaagctgtgtgatctggatggagtgaagcctctgatcctgagagattgttctgtggctggatggctgctgggaaaccctatgtgtgacgagttcatcaatgtgcctgagtggagctatatcgtggagaaggccaaccctgtgaatgatctgtgttaccccggcgacttcaatgattacgaggagctgaagcacctgctgtccagaatcaaccacttcgagaagatccagatcatccctaagtctagctggtctagccatgaagcttctctgggagtgtctagcgcttgtccctatcagagaaagagcagcttcttcagaaatgtggtgtggctgatcaagaagaacagcacctaccccacaatcaagcggagctacaacaacaccaaccaggaagatctgctggtcctgtggggaattcaccatcctaatgatgccgccgagcagacaaagctgtaccagaaccccaccacatatatctctgtgggcaccagcacactgaatcagagactggtgcctagaatcgccacaagatccaaggtgaacggccagtctggcagaatggagttcttctggaccatcctgaagccaaacgacgccatcaacttcgagagcaacggcaatttcatcgcccctgagtacgcctataagatcgtgaagaagggcgatagcaccatcatgaagagcgagctggagtacggcaactgtaataccaagtgccagacacctatgggcgccatcaatagctctatgcccttccacaatatccaccctctgacaatcggcgagtgtcctaagtacgtgaagagcaacagactggtgctggctacaggcctgagaaatagccctcagagagagacaagaggactgtttggagccatcgccggattcattgaagggggatggcagggaatggtcgatggctggtatggctatcaccacagcaatgagcagggatctggatatgccgccgataaggagtctacacagaaggccatcgacggcgtcacaaacaaggtgaacagcatcatcgacaagatgaacacccagtttgaggctgtgggcagagagttcaacaacctggagcggagaatcgagaacctgaacaagaagatggaggacggctttctggatgtgtggacctataatgccgaactgctggtgctgatggagaacgagagaaccctggatttccacgacagcaacgtgaagaacctgtacgacaaagtgagactgcagctgagagataatgccaaggaactgggcaatggctgcttcgagttctaccacaagtgtgacaacgagtgtatggagtctgtgagaaacggcacctacgattaccctcagtactctgaggaagccagactgaagcgcgaggagatcggaggaggatctggaggaggaagtggctctaggctggtgccaagaggatctcctggcagcggatatattcctgaggcccctagagatggacaggcctatgtgagaaaggatggcgaatgggtgctgctgtctacatttctgggacaccaccaccatcaccattgatgagcggccgctgcagatctgatcctttcctgggacccggcaagaaccaaaaactcactctcttcaaggaaatccgtaatgttaaacccgacacgatgaagcttgtcgttggatggaaaggaaaagagttctacagggaaacttggacccgcttcatggaagacagcttccccattgttaacgaccaagaagtgatggatgttttccttgttgtcaacatgcgtcccactagacccaaccgttgttacaaattcctggcccaacacgctctgcgttgcgaccccgactatgtacctcatgacgtgattaggatcgtcgagccttcatgggtgggcagcaacaacgagtaccgcatcagcctggctaagaagggcggcggctgcccaataatgaaccttcactctgagtacaccaactcgttcgaacagttcatcgatcgtgtcatctgggagaacttctacaagcccatcgtttacatcggtaccgactctgctgaagaggaggaaattctccttgaagtttccctggtgttcaaagtaaaggagtttgcaccagacgcacctctgttcactggtccggcgtattaaaacacgatacattgttattagtacatttattaagcgctagattctgtgcgttgttgatttacagacaattgttgtacgtattttaataattcattaaatttataatctttagggtggtatgttagagcgaaaatcaaatgattttcagcgtctttatatctgaatttaaatattaaatcctcaatagatttgtaaaataggtttcgattagtttcaaacaagggttgtttttccgaaccgatggctggactatctaatggattttcgctcaacgccacaaaacttgccaaatcttgtagcagcaatctagctttgtcgatattcgtttgtgttttgttttgtaataaaggttcgacgtcgttcaaaatattatgcgcttttgtatttctttcatcactgtcgttagtgtacaattgactcgacgtaaacacgttaaataaagcttggacatatttaacatcgggcgtgttagctttattaggccgattatcgtcgtcgtcccaaccctcgtcgttagaagttgcttccgaagacgattttgccatagccacacgacgcctattaattgtgtcggctaacacgtccgcgatcaaatttgtagttgagctttttggaattatttctgattgcgggcgtttttgggcgggtttcaatctaactgtgcccgattttaattcagacaacacgttagaaagcgatggtgcaggcggtggtaacatttcagacggcaaatctactaatggcggcggtggtggagctgatgataaatctaccatcggtggaggcgcaggcggggctggcggcggaggcggaggcggaggtggtggcggtgatgcagacggcggtttaggctcaaatgtctctttaggcaacacagtcggcacctcaactattgtactggtttcgggcgccgtttttggtttgaccggtctgagacgagtgcgatttttttcgtttctaatagcttccaacaattgttgtctgtcgtctaaaggtgcagcgggttgaggttccgtcggcattggtggagcgggcggcaattcagacatcgatggtggtggtggtggtggaggcgctggaatgttaggcacgggagaaggtggtggcggcggtgccgccggtataatttgttctggtttagtttgttcgcgcacgattgtgggcaccggcgcaggcgccgctggctgcacaacggaaggtcgtctgcttcgaggcagcgcttggggtggtggcaattcaatattataattggaatacaaatcgtaaaaatctgctataagcattgtaatttcgctatcgtttaccgtgccgatatttaacaaccgctcaatgtaagcaattgtattgtaaagagattgtctcaagctccgcacgccgataacaagccttttcatttttactacagcattgtagtggcgagacacttcgctgtcgtcgacgtacatgtatgctttgttgtcaaaaacgtcgttggcaagctttaaaatatttaaaagaacatctctgttcagcaccactgtgttgtcgtaaatgttgtttttgataatttgcgcttccgcagtatcgacacgttcaaaaaattgatgcgcatcaattttgttgttcctattattgaataaataagattgtacagattcatatctacgattcgtcatggccaccacaaatgctacgctgcaaacgctggtacaattttacgaaaactgcaaaaacgtcaaaactcggtataaaataatcaacgggcgctttggcaaaatatctattttatcgcacaagcccactagcaaattgtatttgcagaaaacaatttcggcgcacaattttaacgctgacgaaataaaagttcaccagttaatgagcgaccacccaaattttataaaaatctattttaatcacggttccatcaacaaccaagtgatcgtgatggactacattgactgtcccgatttatttgaaacactacaaattaaaggcgagctttcgtaccaacttgttagcaatattattagacagctgtgtgaagcgctcaacgatttgcacaagcacaatttcatacacaacgacataaaactcgaaaatgtcttatatttcgaagcacttgatcgcgtgtatgtttgcgattacggattgtgcaaacacgaaaactcacttagcgtgcacgacggcacgttggagtattttagtccggaaaaaattcgacacacaactatgcacgtttcgtttgactggtacgcggcgtgttaacatacaagttgctaaccggcggttcgtaatcatggtcatagctgtttcctgtgtgaaattgttatccgctcacaattccacacaacatacgagccggaagcataaagtgtaaagcctggggtgcctaatgagtgagctaactcacattaattgcgttgcgctcactgcccgctttccagtcgggaaacctgtcgtgccagctgcattaatgaatcggccaacgcgcggggagaggcggtttgcgtattgggcgctcttccgcttcctcgctcactgactcgctgcgctcggtcgttcggctgcggcgagcggtatcagctcactcaaaggcggtaatacggttatccacagaatcaggggataacgcaggaaagaacatgtgagcaaaaggccagcaaaaggccaggaaccgtaaaaaggccgcgttgctggcgtttttccataggctccgcccccctgacgagcatcacaaaaatcgacgctcaagtcagaggtggcgaaacccgacaggactataaagataccaggcgtttccccctggaagctccctcgtgcgctctcctgttccgaccctgccgcttaccggatacctgtccgcctttctcccttcgggaagcgtggcgctttctcatagctcacgctgtaggtatctcagttcggtgtaggtcgttcgctccaagctgggctgtgtgcacgaaccccccgttcagcccgaccgctgcgccttatccggtaactatcgtcttgagtccaacccggtaagacacgacttatcgccactggcagcagccactggtaacaggattagcagagcgaggtatgtaggcggtgctacagagttcttgaagtggtggcctaactacggctacactagaaggacagtatttggtatctgcgctctgctgaagccagttaccttcggaaaaagagttggtagctcttgatccggcaaacaaaccaccgctggtagcggtggtttttttgtttgcaagcagcagattacgcgcagaaaaaaaggatctcaagaagatcctttgatcttttctacggggtctgacgctcagtggaacgaaaactcacgttaagggattttggtcatgagattatcaaaaaggatcttcacctagatccttttaaattaaaaatgaagttttaaatcaatctaaagtatatatgagtaaacttggtctgacagttaccaatgcttaatcagtgaggcacctatctcagcgatctgtctatttcgttcatccatagttgcctgactccccgtcgtgtagataactacgatacgggagggcttaccatctggccccagtgctgcaatgataccgcgagacccacgctcaccggctccagatttatcagcaataaaccagccagccggaagggccgagcgcagaagtggtcctgcaactttatccgcctccatccagtctattaattgttgccgggaagctagagtaagtagttcgccagttaatagtttgcgcaacgttgttgccattgctacaggcatcgtggtgtcacgctcgtcgtttggtatggcttcattcagctccggttcccaacgatcaaggcgagttacatgatcccccatgttgtgcaaaaaagcggttagctccttcggtcctccgatcgttgtcagaagtaagttggccgcagtgttatcactcatggttatggcagcactgcataattctcttactgtcatgccatccgtaagatgcttttctgtgactggtgagtactcaaccaagtcattctgagaatagtgtatgcggcgaccgagttgctcttgcccggcgtcaatacgggataataccgcgccacatagcagaactttaaaagtgctcatcattggaaaacgttcttcggggcgaaaactctcaaggatcttaccgctgttgagatccagttcgatgtaacccactcgtgcacccaactgatcttcagcatcttttactttcaccagcgtttctgggtgagcaaaaacaggaaggcaaaatgccgcaaaaaagggaataagggcgacacggaaatgttgaatactcatactcttcctttttcaatattattgaagcatttatcagggttattgtctcatgagcggatacatatttgaatgtatttagaaaaataaacaaataggggttccgcgcacatttccccgaaaagtgccacctgacgtctaagaaaccattattatcatgacattaacctataaaaataggcgtatcacgaggccctttcgtctcgcgcgtttcggtgatgacggtgaaaacctctgacacatgcagctcccggagacggtcacagcttgtctgtaagcggatgccgggagcagacaagcccgtcagggcgcgtcagcgggtgttggcgggtgtcggggctggcttaactatgcggcatcagagcagattgtactgagagtgcaccatatgcggtgtgaaataccgcacagatgcgtaaggagaaaataccgcatcaggcgccattcgccattcaggctgcgcaactgttgggaagggcgatcggtgcgggcctcttcgctattacgccagctggcgaaagggggatgtgctgcaaggcgattaagttgggtaacgccagggttttcccagtcacgacgttgtaaaacgacggccagtgcc

SEQ ID NO: 52 - DNA, 6128 bp, Artificial Sequence
  Plasmid DNA: 53956
tcgcgcgtttcggtgatgacggtgaaaacctctgacacatgcagctcccggagacggtcacagcttgtctgtaagcggatgccgggagcagacaagcccgtcagggcgcgtcagcgggtgttggcgggtgtcggggctggcttaactatgcggcatcagagcagattgtactgagagtgcaccatatgcggtgtgaaataccgcacagatgcgtaaggagaaaataccgcatcagattggctattggccattgcatacgttgtatccatatcataatatgtacatttatattggctcatgtccaacattaccgccatgttgacattgattattgactagttattaatagtaatcaattacggggtcattagttcatagcccatatatggagttccgcgttacataacttacggtaaatggcccgcctggctgaccgcccaacgacccccgcccattgacgtcaataatgacgtatgttcccatagtaacgccaatagggactttccattgacgtcaatgggtggagtatttacggtaaactgcccacttggcagtacatcaagtgtatcatatgccaagtacgccccctattgacgtcaatgacggtaaatggcccgcctggcattatgcccagtacatgaccttatgggactttcctacttggcagtacatctacgtattagtcatcgctattaccatggtgatgcggttttggcagtacatcaatgggcgtggatagcggtttgactcacggggatttccaagtctccaccccattgacgtcaatgggagtttgttttggcaccaaaatcaacgggactttccaaaatgtcgtaacaactccgccccattgacgcaaatgggcggtaggcgtgtacggtgggaggtctatataagcagagctcgtttagtgaaccgtcagatcgcctggagacgccatccacgctgttttgacctccatagaagacaccgggaccgatccagcctccatcggctcgcatctctccttcacgcgcccgccgccctacctgaggccgccatccacgccggttgagtcgcgttctgccgcctcccgcctgtggtgcctcctgaactgcgtccgccgtctaggtaagtttaaagctcaggtcgagaccgggcctttgtccggcgctcccttggagcctacctagactcagccggctctccacgctttgcctgaccctgcttgctcaactctagttaacggtggagggcagtgtagtctgagcagtactcgttgctgccgcgcgcgccaccagacataatagctgacagactaacagactgttcctttccatgggtcttttctgcagtcaccgtcgtcgacacgtgtgatcagatatcgcggccgctctagagatatcgccaccatgaaggccaaactgctggtgctgctgtgtgccctggccgccacagatgccgataccatctgtatcggctaccacgccaacaatagcaccgacaccgtggatacactgctggagaagaacgtgaccgtgacccactctgtgaacctgctggaggacagccacaatggcaagctgtgtaagctgaaaggcatcgcccctctgcagctgggcaagtgtaatatcgccggatggctgctgggaaaccccgagtgtgattctctgctgcctgccaagagctggagctacatcgtggagacccccaattctgagaatggcgcctgctaccctggcgacttcatcgattacgaggagctgaaggagcagctgagttctgtctctagcctggagagattcgagatcttccccaaggagagcagctggcccaatcacaataccctgaagggagtgacagccgcctgtagccacagaggcaagagcagcttctaccggaatctgctgtggctgaccaagaccggcgatagctaccccaagctgaacaacagctacgtgaacaacaagggcaaggaagtgctggtgctgtggggagtgcaccaccctagcagcagcaatgagcagcagagcctgtaccacaacgtgaacgcctatgtgagcgtggtgtccagcaactacaaccggagattcacccctgaaatcgccgccagacccaaagtgagagaccagcccggcaggatgaattactactggaccctgctggagcctggcgataccatcatctttgaggccaccggcaatctgattgccccttggtacgcctttgccctgagcagaggctttggcagcggcatcatcacaagcaacgccagcatgcacgagtgtaacaccaagagccagacacctcagggcgccatcaatagcagcctgcccttccagaatatccaccccgtgcctatcggcgagtgtcccaagtatgtgaggagcaccaagctgagaatggtgaccggcctgagaaacatccctcagagggagaccagaggactgtttggagccatcgccggattcatcgagggaggatggaccggaatgatcgatggctggtacggctaccaccaccagaatgagcagggctctggatatgccgccgatcagaagtctacccagaacgccatcaacggcatcaccaacaaggtgaacagcatcatcgagaagatgaacacccagttcaccgccgtgtccaaggagttcaacaacctggagaagcggatggagaacctgaacaagaaggtggacgacggctttctggacatctggacctacaatgccgagctgctcgtgctgctcgagaatgagaggaccctggacttccacgacagcaacgtgaagaacctgtatgagaaggtgaagagccagctgaagaacaacgccaaggagatcggcaacggctgcttcgagttctaccacaagtgtgacaacgagtgtatggagtctgtgaggaacggcacctacgactaccctaagtacagcgaggagagcaagctgaaccgggagaagatcgatggcgtgaagctggagagcatgggcgtgtatcagatcctggccatctacagcacagtggcctcttctctggtcctcctggtgtctctgggcgcaatctccttttggatgtgctccaacggcagcctgcagtgcaggatctgtatctgatgaacacgtgggatccagatctgctgtgccttctagttgccagccatctgttgtttgcccctcccccgtgccttccttgaccctggaaggtgccactcccactgtcctttcctaataaaatgaggaaattgcatcgcattgtctgagtaggtgtcattctattctggggggtggggtggggcaggacagcaagggggaggattgggaagacaatagcaggcatgctggggatgcggtgggctctatgggtacccaggtgctgaagaattgacccggttcctcctgggccagaaagaagcaggcacatccccttctctgtgacacaccctgtccacgcccctggttcttagttccagccccactcataggacactcatagctcaggagggctccgccttcaatcccacccgctaaagtacttggagcggtctctccctccctcatcagcccaccaaaccaaacctagcctccaagagtgggaagaaattaaagcaagataggctattaagtgcagagggagagaaaatgcctccaacatgtgaggaagtaatgagagaaatcatagaattttaaggccatgatttaaggccatcatggccttaatcttccgcttcctcgctcactgactcgctgcgctcggtcgttcggctgcggcgagcggtatcagctcactcaaaggcggtaatacggttatccacagaatcaggggataacgcaggaaagaacatgtgagcaaaaggccagcaaaaggccaggaaccgtaaaaaggccgcgttgctggcgtttttccataggctccgcccccctgacgagcatcacaaaaatcgacgctcaagtcagaggtggcgaaacccgacaggactataaagataccaggcgtttccccctggaagctccctcgtgcgctctcctgttccgaccctgccgcttaccggatacctgtccgcctttctcccttcgggaagcgtggcgctttctcatagctcacgctgtaggtatctcagttcggtgtaggtcgttcgctccaagctgggctgtgtgcacgaaccccccgttcagcccgaccgctgcgccttatccggtaactatcgtcttgagtccaacccggtaagacacgacttatcgccactggcagcagccactggtaacaggattagcagagcgaggtatgtaggcggtgctacagagttcttgaagtggtggcctaactacggctacactagaagaacagtatttggtatctgcgctctgctgaagccagttaccttcggaaaaagagttggtagctcttgatccggcaaacaaaccaccgctggtagcggtggtttttttgtttgcaagcagcagattacgcgcagaaaaaaaggatctcaagaagatcctttgatcttttctacggggtctgacgctcagtggaacgaaaactcacgttaagggattttggtcatgagattatcaaaaaggatcttcacctagatccttttaaattaaaaatgaagttttaaatcaatctaaagtatatatgagtaaacttggtctgacagttaccaatgcttaatcagtgaggcacctatctcagcgatctgtctatttcgttcatccatagttgcctgactcggggggggggggcgctgaggtctgcctcgtgaagaaggtgttgctgactcataccaggcctgaatcgccccatcatccagccagaaagtgagggagccacggttgatgagagctttgttgtaggtggaccagttggtgattttgaacttttgctttgccacggaacggtctgcgttgtcgggaagatgcgtgatctgatccttcaactcagcaaaagttcgatttattcaacaaagccgccgtcccgtcaagtcagcgtaatgctctgccagtgttacaaccaattaaccaattctgattagaaaaactcatcgagcatcaaatgaaactgcaatttattcatatcaggattatcaataccatatttttgaaaaagccgtttctgtaatgaaggagaaaactcaccgaggcagttccataggatggcaagatcctggtatcggtctgcgattccgactcgtccaacatcaatacaacctattaatttcccctcgtcaaaaataaggttatcaagtgagaaatcaccatgagtgacgactgaatccggtgagaatggcaaaagcttatgcatttctttccagacttgttcaacaggccagccattacgctcgtcatcaaaatcactcgcatcaaccaaaccgttattcattcgtgattgcgcctgagcgagacgaaatacgcgatcgctgttaaaaggacaattacaaacaggaatcgaatgcaaccggcgcaggaacactgccagcgcatcaacaatattttcacctgaatcaggatattcttctaatacctggaatgctgttttcccggggatcgcagtggtgagtaaccatgcatcatcaggagtacggataaaatgcttgatggtcggaagaggcataaattccgtcagccagtttagtctgaccatctcatctgtaacatcattggcaacgctacctttgccatgtttcagaaacaactctggcgcatcgggcttcccatacaatcgatagattgtcgcacctgattgcccgacattatcgcgagcccatttatacccatataaatcagcatccatgttggaatttaatcgcggcctcgagcaagacgtttcccgttgaatatggctcataacaccccttgtattactgtttatgtaagcagacagttttattgttcatgatgatatatttttatcttgtgcaatgtaacatcagagattttgagacacaacgtggctttccccccccccccattattgaagcatttatcagggttattgtctcatgagcggatacatatttgaatgtatttagaaaaataaacaaataggggttccgcgcacatttccccgaaaagtgccacctgacgtctaagaaaccattattatcatgacattaacctataaaaataggcgtatcacgaggccctttcgtc

SEQ ID NO: 53 - DNA, 6122 bp, Artificial Sequence
  Plasmid DNA: 53957
tcgcgcgtttcggtgatgacggtgaaaacctctgacacatgcagctcccggagacggtcacagcttgtctgtaagcggatgccgggagcagacaagcccgtcagggcgcgtcagcgggtgttggcgggtgtcggggctggcttaactatgcggcatcagagcagattgtactgagagtgcaccatatgcggtgtgaaataccgcacagatgcgtaaggagaaaataccgcatcagattggctattggccattgcatacgttgtatccatatcataatatgtacatttatattggctcatgtccaacattaccgccatgttgacattgattattgactagttattaatagtaatcaattacggggtcattagttcatagcccatatatggagttccgcgttacataacttacggtaaatggcccgcctggctgaccgcccaacgacccccgcccattgacgtcaataatgacgtatgttcccatagtaacgccaatagggactttccattgacgtcaatgggtggagtatttacggtaaactgcccacttggcagtacatcaagtgtatcatatgccaagtacgccccctattgacgtcaatgacggtaaatggcccgcctggcattatgcccagtacatgaccttatgggactttcctacttggcagtacatctacgtattagtcatcgctattaccatggtgatgcggttttggcagtacatcaatgggcgtggatagcggtttgactcacggggatttccaagtctccaccccattgacgtcaatgggagtttgttttggcaccaaaatcaacgggactttccaaaatgtcgtaacaactccgccccattgacgcaaatgggcggtaggcgtgtacggtgggaggtctatataagcagagctcgtttagtgaaccgtcagatcgcctggagacgccatccacgctgttttgacctccatagaagacaccgggaccgatccagcctccatcggctcgcatctctccttcacgcgcccgccgccctacctgaggccgccatccacgccggttgagtcgcgttctgccgcctcccgcctgtggtgcctcctgaactgcgtccgccgtctaggtaagtttaaagctcaggtcgagaccgggcctttgtccggcgctcccttggagcctacctagactcagccggctctccacgctttgcctgaccctgcttgctcaactctagttaacggtggagggcagtgtagtctgagcagtactcgttgctgccgcgcgcgccaccagacataatagctgacagactaacagactgttcctttccatgggtcttttctgcagtcaccgtcgtcgacacgtgtgatcagatatcgcggccgctctagagatatcgccaccatgaaggccaaactgctggtgctgctgtgtgccctggccgccacagatgccgataccatctgtatcggctaccacgccaacaatagcaccgacaccgtggatacactgctggagaagaacgtgaccgtgacccactctgtgaacctgctggaggacagccacaatggcaagctgtgtaagctgaaaggcatcgcccctctgcagctgggcaagtgtaatatcgccggatggctgctgggaaaccccgagtgtgattctctgctgcctgccaagagctggagctacatcgtggagacccccaattctgagaatggcgcctgctaccctggcgacttcatcgattacgaggagctgaaggagcagctgagttctgtctctagcctggagagattcgagatcttccccaaggagagcagctggcccaatcacaataccctgaagggagtgacagccgcctgtagccacagaggcaagagcagcttctaccggaatctgctgtggctgaccaagaccggcgatagctaccccaagctgaacaacagctacgtgaacaacaagggcaaggaagtgctggtgctgtggggagtgcaccaccctagcagcagcaatgagcagcagagcctgtaccacaacgtgaacgcctatgtgagcgtggtgtccagcaactacaaccggagattcacccctgaaatcgccgccagacccaaagtgagagaccagcccggcaggatgaattactactggaccctgctggagcctggcgataccatcatctttgaggccaccggcaatctgattgccccttggtacgcctttgccctgagcagaggctttggcagcggcatcatcacaagcaacgccagcatgcacgagtgtaacaccaagagccagacacctcagggcgccatcaatagcagcctgcccttccagaatatccaccccgtgcctatcggcgagtgtcccaagtatgtgaggagcaccaagctgagaatggtgaccggcctgagaaacatccctcagagggagaccagaggactgtttggagccatcgccggattcatcgagggaggatggaccggaatgatcgatggctggtacggctaccaccaccagaatgagcagggctctggatatgccgccgatcagaagtctacccagaacgccatcaacggcatcaccaacaaggtgaacagcatcatcgagaagatgaacacccagttcaccgccgtgtccaaggagttcaacaacctggagaagcggatggagaacctgaacaagaaggtggacgacggctttctggacatctggacctacaatgccgagctgctcgtgctgctcgagaatgagaggaccctggacttccacgacagcaacgtgaagaacctgtatgagaaggtgaagagccagctgaagaacaacgccaaggagatcggcaacggctgcttcgagttctaccacaagtgtgacaacgagtgtatggagtctgtgaggaacggcacctacgactaccctaagtacagcgaggagagcaagctgaaccgggagaagatcgatagcggcagactggtgcctagaggatctcctggcagcggatatattcctgaggcccctagagatggacaggcctatgtgagaaaggatggcgaatgggtgctgctgtctacatttctgggacaccaccatcaccaccattgatgaacacgtgggatccagatctgctgtgccttctagttgccagccatctgttgtttgcccctcccccgtgccttccttgaccctggaaggtgccactcccactgtcctttcctaataaaatgaggaaattgcatcgcattgtctgagtaggtgtcattctattctggggggtggggtggggcaggacagcaagggggaggattgggaagacaatagcaggcatgctggggatgcggtgggctctatgggtacccaggtgctgaagaattgacccggttcctcctgggccagaaagaagcaggcacatccccttctctgtgacacaccctgtccacgcccctggttcttagttccagccccactcataggacactcatagctcaggagggctccgccttcaatcccacccgctaaagtacttggagcggtctctccctccctcatcagcccaccaaaccaaacctagcctccaagagtgggaagaaattaaagcaagataggctattaagtgcagagggagagaaaatgcctccaacatgtgaggaagtaatgagagaaatcatagaattttaaggccatgatttaaggccatcatggccttaatcttccgcttcctcgctcactgactcgctgcgctcggtcgttcggctgcggcgagcggtatcagctcactcaaaggcggtaatacggttatccacagaatcaggggataacgcaggaaagaacatgtgagcaaaaggccagcaaaaggccaggaaccgtaaaaaggccgcgttgctggcgtttttccataggctccgcccccctgacgagcatcacaaaaatcgacgctcaagtcagaggtggcgaaacccgacaggactataaagataccaggcgtttccccctggaagctccctcgtgcgctctcctgttccgaccctgccgcttaccggatacctgtccgcctttctcccttcgggaagcgtggcgctttctcatagctcacgctgtaggtatctcagttcggtgtaggtcgttcgctccaagctgggctgtgtgcacgaaccccccgttcagcccgaccgctgcgccttatccggtaactatcgtcttgagtccaacccggtaagacacgacttatcgccactggcagcagccactggtaacaggattagcagagcgaggtatgtaggcggtgctacagagttcttgaagtggtggcctaactacggctacactagaagaacagtatttggtatctgcgctctgctgaagccagttaccttcggaaaaagagttggtagctcttgatccggcaaacaaaccaccgctggtagcggtggtttttttgtttgcaagcagcagattacgcgcagaaaaaaaggatctcaagaagatcctttgatcttttctacggggtctgacgctcagtggaacgaaaactcacgttaagggattttggtcatgagattatcaaaaaggatcttcacctagatccttttaaattaaaaatgaagttttaaatcaatctaaagtatatatgagtaaacttggtctgacagttaccaatgcttaatcagtgaggcacctatctcagcgatctgtctatttcgttcatccatagttgcctgactcggggggggggggcgctgaggtctgcctcgtgaagaaggtgttgctgactcataccaggcctgaatcgccccatcatccagccagaaagtgagggagccacggttgatgagagctttgttgtaggtggaccagttggtgattttgaacttttgctttgccacggaacggtctgcgttgtcgggaagatgcgtgatctgatccttcaactcagcaaaagttcgatttattcaacaaagccgccgtcccgtcaagtcagcgtaatgctctgccagtgttacaaccaattaaccaattctgattagaaaaactcatcgagcatcaaatgaaactgcaatttattcatatcaggattatcaataccatatttttgaaaaagccgtttctgtaatgaaggagaaaactcaccgaggcagttccataggatggcaagatcctggtatcggtctgcgattccgactcgtccaacatcaatacaacctattaatttcccctcgtcaaaaataaggttatcaagtgagaaatcaccatgagtgacgactgaatccggtgagaatggcaaaagcttatgcatttctttccagacttgttcaacaggccagccattacgctcgtcatcaaaatcactcgcatcaaccaaaccgttattcattcgtgattgcgcctgagcgagacgaaatacgcgatcgctgttaaaaggacaattacaaacaggaatcgaatgcaaccggcgcaggaacactgccagcgcatcaacaatattttcacctgaatcaggatattcttctaatacctggaatgctgttttcccggggatcgcagtggtgagtaaccatgcatcatcaggagtacggataaaatgcttgatggtcggaagaggcataaattccgtcagccagtttagtctgaccatctcatctgtaacatcattggcaacgctacctttgccatgtttcagaaacaactctggcgcatcgggcttcccatacaatcgatagattgtcgcacctgattgcccgacattatcgcgagcccatttatacccatataaatcagcatccatgttggaatttaatcgcggcctcgagcaagacgtttcccgttgaatatggctcataacaccccttgtattactgtttatgtaagcagacagttttattgttcatgatgatatatttttatcttgtgcaatgtaacatcagagattttgagacacaacgtggctttccccccccccccattattgaagcatttatcagggttattgtctcatgagcggatacatatttgaatgtatttagaaaaataaacaaataggggttccgcgcacatttccccgaaaagtgccacctgacgtctaagaaaccattattatcatgacattaacctataaaaataggcgtatcacgaggccctttcgtc

SEQ ID NO: 54 - DNA, 11389 bp, Artificial Sequence
  Plasmid DNA: 53967
aagctttactcgtaaagcgagttgaaggatcatatttagttgcgtttatgagataagattgaaagcacgtgtaaaatgtttcccgcgcgttggcacaactatttacaatgcggccaagttataaaagattctaatctgatatgttttaaaacacctttgcggcccgagttgtttgcgtacgtgactagcgaagaagatgtgtggaccgcagaacagatagtaaaacaaaaccctagtattggagcaataatcgatttaaccaacacgtctaaatattatgatggtgtgcattttttgcgggcgggcctgttatacaaaaaaattcaagtacctggccagactttgccgcctgaaagcatagttcaagaatttattgacacggtaaaagaatttacagaaaagtgtcccggcatgttggtgggcgtgcactgcacacacggtattaatcgcaccggttacatggtgtgcagatatttaatgcacaccctgggtattgcgccgcaggaagccatagatagattcgaaaaagccagaggtcacaaaattgaaagacaaaattacgttcaagatttattaatttaattaatattatttgcattctttaacaaatactttatcctattttcaaattgttgcgcttcttccagcgaaccaaaactatgcttcgcttgctccgtttagcttgtagccgatcagtggcgttgttccaatcgacggtaggattaggccggatattctccaccacaatgttggcaacgttgatgttacgtttatgcttttggttttccacgtacgtcttttggccggtaatagccgtaaacgtagtgccgtcgcgcgtcacgcacaacaccggatgtttgcgcttgtccgcggggtattgaaccgcgcgatccgacaaatccaccactttggcaactaaatcggtgacctgcgcgtcttttttctgcattatttcgtctttcttttgcatggtttcctggaagccggtgtacatgcggtttagatcagtcatgacgcgcgtgacctgcaaatctttggcctcgatctgcttgtccttgatggcaacgatgcgttcaataaactcttgttttttaacaagttcctcggttttttgcgccaccaccgcttgcagcgcgtttgtgtgctcggtgaatgtcgcaatcagcttagtcaccaactgtttgctctcctcctcccgttgtttgatcgcgggatcgtacttgccggtgcagagcacttgaggaattacttcttctaaaagccattcttgtaattctatggcgtaaggcaatttggacttcataatcagctgaatcacgccggatttagtaatgagcactgtatgcggctgcaaatacagcgggtcgccccttttcacgacgctgttagaggtagggcccccattttggatggtctgctcaaataacgatttgtatttattgtctacatgaacacgtatagctttatcacaaactgtatattttaaactgttagcgacgtccttggccacgaaccggacctgttggtcgcgctctagcacgtaccgcaggttgaacgtatcttctccaaatttaaattctccaattttaacgcgagccattttgatacacgtgtgtcgattttgcaacaactattgttttttaacgcaaactaaacttattgtggtaagcaataattaaatatgggggaacatgcgccgctacaacactcgtcgttatgaacgcagacggcgccggtctcggcgcaagcggctaaaacgtgttgcgcgttcaacgcggcaaacatcgcaaaagccaatagtacagttttgatttgcatattaacggcgattttttaaattatcttatttaataaatagttatgacgcctacaactccccgcccgcgttgactcgctgcacctcgagcagttcgttgacgccttcctccgtgtggccgaacacgtcgagcgggtggtcgatgaccagcggcgtgccgcacgcgacgcacaagtatctgtacaccgaatgatcgtcgggcgaaggcacgtcggcctccaagtggcaatattggcaaattcgaaaatatatacagttgggttgtttgcgcatatctatcgtggcgttgggcatgtacgtccgaacgttgatttgcatgcaagccgaaattaaatcattgcgattagtgcgattaaaacgttgtacatcctcgcttttaatcatgccgtcgattaaatcgcgcaatcgagtcaagtgatcaaagtgtggaataatgttttctttgtattcccgagtcaagcgcagcgcgtattttaacaaactagccatcttgtaagttagtttcatttaatgcaactttatccaataatatattatgtatcgcacgtcaagaattaacaatgcgcccgttgtcgcatctcaacacgactatgatagagatcaaataaagcgcgaattaaatagcttgcgacgcaacgtgcacgatctgtgcacgcgttccggcacgagctttgattgtaataagtttttacgaagcgatgacatgacccccgtagtgacaacgatcacgcccaaaagaactgccgactacaaaattaccgagtatgtcggtgacgttaaaactattaagccatccaatcgaccgttagtcgaatcaggaccgctggtgcgagaagccgcgaagtatggcgaatgcatcgtataacgtgtggagtccgctcattagagcgtcatgtttagacaagaaagctacatatttaattgatcccgatgattttattgataaattgaccctaactccatacacggtattctacaatggcggggttttggtcaaaatttccggactgcgattgtacatgctgttaacggctccgcccactattaatgaaattaaaaattccaattttaaaaaacgcagcaagagaaacatttgtatgaaagaatgcgtagaaggaaagaaaaatgtcgtcgacatgctgaacaacaagattaatatgcctccgtgtataaaaaaaatattgaacgatttgaaagaaaacaatgtaccgcgcggcggtatgtacaggaagaggtttatactaaactgttacattgcaaacgtggtttcgtgtgccaagtgtgaaaaccgatgtttaatcaaggctctgacgcatttctacaaccacgactccaagtgtgtgggtgaagtcatgcatcttttaatcaaatcccaagatgtgtataaaccaccaaactgccaaaaaatgaaaactgtcgacaagctctgtccgtttgctggcaactgcaagggtctcaatcctatttgtaattattgaataataaaacaattataaatgctaaatttgttttttattaacgatacaaaccaaacgcaacaagaacatttgtagtattatctataattgaaaacgcgtagttataatcgctgaggtaatatttaaaatcattttcaaatgattcacagttaatttgcgacaatataattttattttcacataaactagacgccttgtcgtcttcttcttcgtattccttctctttttcatttttctcctcataaaaattaacatagttattatcgtatccatatatgtatctatcgtatagagtaaattttttgttgtcataaatatatatgtcttttttaatggggtgtatagtaccgctgcgcatagtttttctgtaatttacaacagtgctattttctggtagttcttcggagtgtgttgctttaattattaaatttatataatcaatgaatttgggatcgtcggttttgtacaatatgttgccggcatagtacgcagcttcttctagttcaattacaccattttttagcagcaccggattaacataactttccaaaatgttgtacgaaccgttaaacaaaaacagttcacctcccttttctatactattgtctgcgagcagttgtttgttgttaaaaataacagccattgtaatgagacgcacaaactaatatcacaaactggaaatgtctatcaatatatagttgctgatatcatggagataattaaaatgataaccatctcgcaaataaataagtattttactgttttcgtaacagttttgtaataaaaaaacctataaatattccggattattcataccgtcccaccatcgggcgcggatctatgctactagtaaatcagtcacaccaaggcttcaataaggaacacacaagcaagatggtaagcgctattgttttatatgtgcttttggcggcggcggcgcattctgcctttgcggcggatcccggggataccatctgtatcggctaccacgccaacaatagcaccgacaccgtggatacactgctggagaagaacgtgaccgtgacccactctgtgaacctgctggaggacagccacaatggcaagctgtgtaagctgaaaggcatcgcccctctgcagctgggcaagtgtaatatcgccggatggctgctgggaaaccccgagtgtgattctctgctgcctgccaagagctggagctacatcgtggagacccccaattctgagaatggcgcctgctaccctggcgacttcatcgattacgaggagctgaaggagcagctgagttctgtctctagcctggagagattcgagatcttccccaaggagagcagctggcccaatcacaataccctgaagggagtgacagccgcctgtagccacagaggcaagagcagcttctaccggaatctgctgtggctgaccaagaccggcgatagctaccccaagctgaacaacagctacgtgaacaacaagggcaaggaagtgctggtgctgtggggagtgcaccaccctagcagcagcaatgagcagcagagcctgtaccacaacgtgaacgcctatgtgagcgtggtgtccagcaactacaaccggagattcacccctgaaatcgccgccagacccaaagtgagagaccagcccggcaggatgaattactactggaccctgctggagcctggcgataccatcatctttgaggccaccggcaatctgattgccccttggtacgcctttgccctgagcagaggctttggcagcggcatcatcacaagcaacgccagcatgcacgagtgtaacaccaagagccagacacctcagggcgccatcaatagcagcctgcccttccagaatatccaccccgtgcctatcggcgagtgtcccaagtatgtgaggagcaccaagctgagaatggtgaccggcctgagaaacatccctcagagggagaccagaggactgtttggagccatcgccggattcatcgagggaggatggaccggaatgatcgatggctggtacggctaccaccaccagaatgagcagggctctggatatgccgccgatcagaagtctacccagaacgccatcaacggcatcaccaacaaggtgaacagcatcatcgagaagatgaacacccagttcaccgccgtgtccaaggagttcaacaacctggagaagcggatggagaacctgaacaagaaggtggacgacggctttctggacatctggacctacaatgccgagctgctcgtgctgctcgagaatgagaggaccctggacttccacgacagcaacgtgaagaacctgtatgagaaggtgaagagccagctgaagaacaacgccaaggagatcggcaacggctgcttcgagttctaccacaagtgtgacaacgagtgtatggagtctgtgaggaacggcacctacgactaccctaagtacagcgaggagagcaagctgaaccgggagaagatcgatagcggcagactggtgcctagaggatctcctggcagcggatatattcctgaggcccctagagatggacaggcctatgtgagaaaggatggcgaatgggtgctgctgtctacatttctgggacaccaccatcaccaccattgatgagcggccgctgcagatctgatcctttcctgggacccggcaagaaccaaaaactcactctcttcaaggaaatccgtaatgttaaacccgacacgatgaagcttgtcgttggatggaaaggaaaagagttctacagggaaacttggacccgcttcatggaagacagcttccccattgttaacgaccaagaagtgatggatgttttccttgttgtcaacatgcgtcccactagacccaaccgttgttacaaattcctggcccaacacgctctgcgttgcgaccccgactatgtacctcatgacgtgattaggatcgtcgagccttcatgggtgggcagcaacaacgagtaccgcatcagcctggctaagaagggcggcggctgcccaataatgaaccttcactctgagtacaccaactcgttcgaacagttcatcgatcgtgtcatctgggagaacttctacaagcccatcgtttacatcggtaccgactctgctgaagaggaggaaattctccttgaagtttccctggtgttcaaagtaaaggagtttgcaccagacgcacctctgttcactggtccggcgtattaaaacacgatacattgttattagtacatttattaagcgctagattctgtgcgttgttgatttacagacaattgttgtacgtattttaataattcattaaatttataatctttagggtggtatgttagagcgaaaatcaaatgattttcagcgtctttatatctgaatttaaatattaaatcctcaatagatttgtaaaataggtttcgattagtttcaaacaagggttgtttttccgaaccgatggctggactatctaatggattttcgctcaacgccacaaaacttgccaaatcttgtagcagcaatctagctttgtcgatattcgtttgtgttttgttttgtaataaaggttcgacgtcgttcaaaatattatgcgcttttgtatttctttcatcactgtcgttagtgtacaattgactcgacgtaaacacgttaaataaagcttggacatatttaacatcgggcgtgttagctttattaggccgattatcgtcgtcgtcccaaccctcgtcgttagaagttgcttccgaagacgattttgccatagccacacgacgcctattaattgtgtcggctaacacgtccgcgatcaaatttgtagttgagctttttggaattatttctgattgcgggcgtttttgggcgggtttcaatctaactgtgcccgattttaattcagacaacacgttagaaagcgatggtgcaggcggtggtaacatttcagacggcaaatctactaatggcggcggtggtggagctgatgataaatctaccatcggtggaggcgcaggcggggctggcggcggaggcggaggcggaggtggtggcggtgatgcagacggcggtttaggctcaaatgtctctttaggcaacacagtcggcacctcaactattgtactggtttcgggcgccgtttttggtttgaccggtctgagacgagtgcgatttttttcgtttctaatagcttccaacaattgttgtctgtcgtctaaaggtgcagcgggttgaggttccgtcggcattggtggagcgggcggcaattcagacatcgatggtggtggtggtggtggaggcgctggaatgttaggcacgggagaaggtggtggcggcggtgccgccggtataatttgttctggtttagtttgttcgcgcacgattgtgggcaccggcgcaggcgccgctggctgcacaacggaaggtcgtctgcttcgaggcagcgcttggggtggtggcaattcaatattataattggaatacaaatcgtaaaaatctgctataagcattgtaatttcgctatcgtttaccgtgccgatatttaacaaccgctcaatgtaagcaattgtattgtaaagagattgtctcaagctccgcacgccgataacaagccttttcatttttactacagcattgtagtggcgagacacttcgctgtcgtcgacgtacatgtatgctttgttgtcaaaaacgtcgttggcaagctttaaaatatttaaaagaacatctctgttcagcaccactgtgttgtcgtaaatgttgtttttgataatttgcgcttccgcagtatcgacacgttcaaaaaattgatgcgcatcaattttgttgttcctattattgaataaataagattgtacagattcatatctacgattcgtcatggccaccacaaatgctacgctgcaaacgctggtacaattttacgaaaactgcaaaaacgtcaaaactcggtataaaataatcaacgggcgctttggcaaaatatctattttatcgcacaagcccactagcaaattgtatttgcagaaaacaatttcggcgcacaattttaacgctgacgaaataaaagttcaccagttaatgagcgaccacccaaattttataaaaatctattttaatcacggttccatcaacaaccaagtgatcgtgatggactacattgactgtcccgatttatttgaaacactacaaattaaaggcgagctttcgtaccaacttgttagcaatattattagacagctgtgtgaagcgctcaacgatttgcacaagcacaatttcatacacaacgacataaaactcgaaaatgtcttatatttcgaagcacttgatcgcgtgtatgtttgcgattacggattgtgcaaacacgaaaactcacttagcgtgcacgacggcacgttggagtattttagtccggaaaaaattcgacacacaactatgcacgtttcgtttgactggtacgcggcgtgttaacatacaagttgctaaccggcggttcgtaatcatggtcatagctgtttcctgtgtgaaattgttatccgctcacaattccacacaacatacgagccggaagcataaagtgtaaagcctggggtgcctaatgagtgagctaactcacattaattgcgttgcgctcactgcccgctttccagtcgggaaacctgtcgtgccagctgcattaatgaatcggccaacgcgcggggagaggcggtttgcgtattgggcgctcttccgcttcctcgctcactgactcgctgcgctcggtcgttcggctgcggcgagcggtatcagctcactcaaaggcggtaatacggttatccacagaatcaggggataacgcaggaaagaacatgtgagcaaaaggccagcaaaaggccaggaaccgtaaaaaggccgcgttgctggcgtttttccataggctccgcccccctgacgagcatcacaaaaatcgacgctcaagtcagaggtggcgaaacccgacaggactataaagataccaggcgtttccccctggaagctccctcgtgcgctctcctgttccgaccctgccgcttaccggatacctgtccgcctttctcccttcgggaagcgtggcgctttctcatagctcacgctgtaggtatctcagttcggtgtaggtcgttcgctccaagctgggctgtgtgcacgaaccccccgttcagcccgaccgctgcgccttatccggtaactatcgtcttgagtccaacccggtaagacacgacttatcgccactggcagcagccactggtaacaggattagcagagcgaggtatgtaggcggtgctacagagttcttgaagtggtggcctaactacggctacactagaaggacagtatttggtatctgcgctctgctgaagccagttaccttcggaaaaagagttggtagctcttgatccggcaaacaaaccaccgctggtagcggtggtttttttgtttgcaagcagcagattacgcgcagaaaaaaaggatctcaagaagatcctttgatcttttctacggggtctgacgctcagtggaacgaaaactcacgttaagggattttggtcatgagattatcaaaaaggatcttcacctagatccttttaaattaaaaatgaagttttaaatcaatctaaagtatatatgagtaaacttggtctgacagttaccaatgcttaatcagtgaggcacctatctcagcgatctgtctatttcgttcatccatagttgcctgactccccgtcgtgtagataactacgatacgggagggcttaccatctggccccagtgctgcaatgataccgcgagacccacgctcaccggctccagatttatcagcaataaaccagccagccggaagggccgagcgcagaagtggtcctgcaactttatccgcctccatccagtctattaattgttgccgggaagctagagtaagtagttcgccagttaatagtttgcgcaacgttgttgccattgctacaggcatcgtggtgtcacgctcgtcgtttggtatggcttcattcagctccggttcccaacgatcaaggcgagttacatgatcccccatgttgtgcaaaaaagcggttagctccttcggtcctccgatcgttgtcagaagtaagttggccgcagtgttatcactcatggttatggcagcactgcataattctcttactgtcatgccatccgtaagatgcttttctgtgactggtgagtactcaaccaagtcattctgagaatagtgtatgcggcgaccgagttgctcttgcccggcgtcaatacgggataataccgcgccacatagcagaactttaaaagtgctcatcattggaaaacgttcttcggggcgaaaactctcaaggatcttaccgctgttgagatccagttcgatgtaacccactcgtgcacccaactgatcttcagcatcttttactttcaccagcgtttctgggtgagcaaaaacaggaaggcaaaatgccgcaaaaaagggaataagggcgacacggaaatgttgaatactcatactcttcctttttcaatattattgaagcatttatcagggttattgtctcatgagcggatacatatttgaatgtatttagaaaaataaacaaataggggttccgcgcacatttccccgaaaagtgccacctgacgtctaagaaaccattattatcatgacattaacctataaaaataggcgtatcacgaggccctttcgtctcgcgcgtttcggtgatgacggtgaaaacctctgacacatgcagctcccggagacggtcacagcttgtctgtaagcggatgccgggagcagacaagcccgtcagggcgcgtcagcgggtgttggcgggtgtcggggctggcttaactatgcggcatcagagcagattgtactgagagtgcaccatatgcggtgtgaaataccgcacagatgcgtaaggagaaaataccgcatcaggcgccattcgccattcaggctgcgcaactgttgggaagggcgatcggtgcgggcctcttcgctattacgccagctggcgaaagggggatgtgctgcaaggcgattaagttgggtaacgccagggttttcccagtcacgacgttgtaaaacgacggccagtgcc

SEQ ID NO: 55 - DNA, 6125 bp, Artificial Sequence
  Plasmid DNA: 53329
tcgcgcgtttcggtgatgacggtgaaaacctctgacacatgcagctcccggagacggtcacagcttgtctgtaagcggatgccgggagcagacaagcccgtcagggcgcgtcagcgggtgttggcgggtgtcggggctggcttaactatgcggcatcagagcagattgtactgagagtgcaccatatgcggtgtgaaataccgcacagatgcgtaaggagaaaataccgcatcagattggctattggccattgcatacgttgtatccatatcataatatgtacatttatattggctcatgtccaacattaccgccatgttgacattgattattgactagttattaatagtaatcaattacggggtcattagttcatagcccatatatggagttccgcgttacataacttacggtaaatggcccgcctggctgaccgcccaacgacccccgcccattgacgtcaataatgacgtatgttcccatagtaacgccaatagggactttccattgacgtcaatgggtggagtatttacggtaaactgcccacttggcagtacatcaagtgtatcatatgccaagtacgccccctattgacgtcaatgacggtaaatggcccgcctggcattatgcccagtacatgaccttatgggactttcctacttggcagtacatctacgtattagtcatcgctattaccatggtgatgcggttttggcagtacatcaatgggcgtggatagcggtttgactcacggggatttccaagtctccaccccattgacgtcaatgggagtttgttttggcaccaaaatcaacgggactttccaaaatgtcgtaacaactccgccccattgacgcaaatgggcggtaggcgtgtacggtgggaggtctatataagcagagctcgtttagtgaaccgtcagatcgcctggagacgccatccacgctgttttgacctccatagaagacaccgggaccgatccagcctccatcggctcgcatctctccttcacgcgcccgccgccctacctgaggccgccatccacgccggttgagtcgcgttctgccgcctcccgcctgtggtgcctcctgaactgcgtccgccgtctaggtaagtttaaagctcaggtcgagaccgggcctttgtccggcgctcccttggagcctacctagactcagccggctctccacgctttgcctgaccctgcttgctcaactctagttaacggtggagggcagtgtagtctgagcagtactcgttgctgccgcgcgcgccaccagacataatagctgacagactaacagactgttcctttccatgggtcttttctgcagtcaccgtcgtcgacacgtgtgatcagatatcgcggccgctctagagatatcgccaccatgaaggccaaactgctggtgctgctgtgtacctttaccgccacctacgccgacacaatctgtatcggctaccacgccaacaatagcaccgacaccgtggatacagtgctggagaagaacgtgaccgtgacccactctgtgaacctgctggaggacagccacaatggcaagctgtgtctgctgaaaggcattgcccctctgcagctgggcaattgttctgtggccggatggattctgggcaaccccgagtgtgagctgctgatttctaaggagagctggagctacatcgtggagacccccaatcctgagaatggcacctgctaccctggctacttcgccgattacgaggagctgcgcgagcagctgtctagcgtgtccagcttcgagagattcgagatcttccccaaggagtccagctggcctaatcacacagtgacaggcgtgtctgccagctgtagccacaacggcaaaagcagcttctaccggaacctgctgtggctgacaggcaagaatggcctgtaccccaacctgagcaagagctacgtgaacaacaaggaaaaggaagtgctggtgctgtggggagtgcaccaccctcccaacatcggaaatcagcgggccctgtaccacacagagaacgcctatgtgagcgtggtgtccagccactacagcagaagattcacccccgagatcgccaagagacccaaagtgagagaccaggagggccggatcaattactactggaccctgctggagcctggcgataccatcatcttcgaggccaacggcaatctgatcgccccttggtatgcctttgccctgagcagaggctttggcagcggcatcatcacaagcaacgcccccatggatgagtgtgatgccaagtgccagacacctcagggcgccatcaatagcagcctgcccttccagaatgtgcaccctgtgaccatcggcgagtgccccaagtatgtgagaagcgccaagctgagaatggtgaccggcctgagaaacatccctagcatccagagcagaggactgtttggagccatcgccggattcatcgagggaggatggacaggcatggtggatggctggtacggctaccaccaccagaatgagcagggctctggatatgccgccgatcagaagtctacccagaacgccatcaacggcatcaccaacaaggtgaacagcgtgatcgagaagatgaacacccagtttaccgctgtgggcaaggagttcaacaagctggagcggaggatggagaacctgaacaagaaggtggacgacggctttctggacatctggacctacaatgccgaactcctggtcctcctcgagaatgagaggaccctggacttccacgacagcaacgtgaagaacctgtatgagaaggtgaagagccagctgaagaacaacgccaaggagatcggcaacggctgcttcgagttctaccacaagtgtaacaacgagtgtatggagagcgtgaagaacggcacctacgactaccctaagtacagcgaggagagcaagctgaaccgggagaagatcgatggcgtgaagctggagagcatgggcgtgtatcagatcctggccatctacagcacagtggcctcttctctggtgctgctggtgtctctgggcgccatctccttttggatgtgctccaacggcagcctgcagtgcaggatctgtatctgatgaacacgtgggatccagatctgctgtgccttctagttgccagccatctgttgtttgcccctcccccgtgccttccttgaccctggaaggtgccactcccactgtcctttcctaataaaatgaggaaattgcatcgcattgtctgagtaggtgtcattctattctggggggtggggtggggcaggacagcaagggggaggattgggaagacaatagcaggcatgctggggatgcggtgggctctatgggtacccaggtgctgaagaattgacccggttcctcctgggccagaaagaagcaggcacatccccttctctgtgacacaccctgtccacgcccctggttcttagttccagccccactcataggacactcatagctcaggagggctccgccttcaatcccacccgctaaagtacttggagcggtctctccctccctcatcagcccaccaaaccaaacctagcctccaagagtgggaagaaattaaagcaagataggctattaagtgcagagggagagaaaatgcctccaacatgtgaggaagtaatgagagaaatcatagaattttaaggccatgatttaaggccatcatggccttaatcttccgcttcctcgctcactgactcgctgcgctcggtcgttcggctgcggcgagcggtatcagctcactcaaaggcggtaatacggttatccacagaatcaggggataacgcaggaaagaacatgtgagcaaaaggccagcaaaaggccaggaaccgtaaaaaggccgcgttgctggcgtttttccataggctccgcccccctgacgagcatcacaaaaatcgacgctcaagtcagaggtggcgaaacccgacaggactataaagataccaggcgtttccccctggaagctccctcgtgcgctctcctgttccgaccctgccgcttaccggatacctgtccgcctttctcccttcgggaagcgtggcgctttctcatagctcacgctgtaggtatctcagttcggtgtaggtcgttcgctccaagctgggctgtgtgcacgaaccccccgttcagcccgaccgctgcgccttatccggtaactatcgtcttgagtccaacccggtaagacacgacttatcgccactggcagcagccactggtaacaggattagcagagcgaggtatgtaggcggtgctacagagttcttgaagtggtggcctaactacggctacactagaagaacagtatttggtatctgcgctctgctgaagccagttaccttcggaaaaagagttggtagctcttgatccggcaaacaaaccaccgctggtagcggtggtttttttgtttgcaagcagcagattacgcgcagaaaaaaaggatctcaagaagatcctttgatcttttctacggggtctgacgctcagtggaacgaaaactcacgttaagggattttggtcatgagattatcaaaaaggatcttcacctagatccttttaaattaaaaatgaagttttaaatcaatctaaagtatatatgagtaaacttggtctgacagttaccaatgcttaatcagtgaggcacctatctcagcgatctgtctatttcgttcatccatagttgcctgactcggggggggggggcgctgaggtctgcctcgtgaagaaggtgttgctgactcataccaggcctgaatcgccccatcatccagccagaaagtgagggagccacggttgatgagagctttgttgtaggtggaccagttggtgattttgaacttttgctttgccacggaacggtctgcgttgtcgggaagatgcgtgatctgatccttcaactcagcaaaagttcgatttattcaacaaagccgccgtcccgtcaagtcagcgtaatgctctgccagtgttacaaccaattaaccaattctgattagaaaaactcatcgagcatcaaatgaaactgcaatttattcatatcaggattatcaataccatatttttgaaaaagccgtttctgtaatgaaggagaaaactcaccgaggcagttccataggatggcaagatcctggtatcggtctgcgattccgactcgtccaacatcaatacaacctattaatttcccctcgtcaaaaataaggttatcaagtgagaaatcaccatgagtgacgactgaatccggtgagaatggcaaaagcttatgcatttctttccagacttgttcaacaggccagccattacgctcgtcatcaaaatcactcgcatcaaccaaaccgttattcattcgtgattgcgcctgagcgagacgaaatacgcgatcgctgttaaaaggacaattacaaacaggaatcgaatgcaaccggcgcaggaacactgccagcgcatcaacaatattttcacctgaatcaggatattcttctaatacctggaatgctgttttcccggggatcgcagtggtgagtaaccatgcatcatcaggagtacggataaaatgcttgatggtcggaagaggcataaattccgtcagccagtttagtctgaccatctcatctgtaacatcattggcaacgctacctttgccatgtttcagaaacaactctggcgcatcgggcttcccatacaatcgatagattgtcgcacctgattgcccgacattatcgcgagcccatttatacccatataaatcagcatccatgttggaatttaatcgcggcctcgagcaagacgtttcccgttgaatatggctcataacaccccttgtattactgtttatgtaagcagacagttttattgttcatgatgatatatttttatcttgtgcaatgtaacatcagagattttgagacacaacgtggctttccccccccccccattattgaagcatttatcagggttattgtctcatgagcggatacatatttgaatgtatttagaaaaataaacaaataggggttccgcgcacatttccccgaaaagtgccacctgacgtctaagaaaccattattatcatgacattaacctataaaaataggcgtatcacgaggccctttcgtc

SEQ ID NO: 56 - DNA, 6125 bp, Artificial Sequence
  Plasmid DNA: 53330
tcgcgcgtttcggtgatgacggtgaaaacctctgacacatgcagctcccggagacggtcacagcttgtctgtaagcggatgccgggagcagacaagcccgtcagggcgcgtcagcgggtgttggcgggtgtcggggctggcttaactatgcggcatcagagcagattgtactgagagtgcaccatatgcggtgtgaaataccgcacagatgcgtaaggagaaaataccgcatcagattggctattggccattgcatacgttgtatccatatcataatatgtacatttatattggctcatgtccaacattaccgccatgttgacattgattattgactagttattaatagtaatcaattacggggtcattagttcatagcccatatatggagttccgcgttacataacttacggtaaatggcccgcctggctgaccgcccaacgacccccgcccattgacgtcaataatgacgtatgttcccatagtaacgccaatagggactttccattgacgtcaatgggtggagtatttacggtaaactgcccacttggcagtacatcaagtgtatcatatgccaagtacgccccctattgacgtcaatgacggtaaatggcccgcctggcattatgcccagtacatgaccttatgggactttcctacttggcagtacatctacgtattagtcatcgctattaccatggtgatgcggttttggcagtacatcaatgggcgtggatagcggtttgactcacggggatttccaagtctccaccccattgacgtcaatgggagtttgttttggcaccaaaatcaacgggactttccaaaatgtcgtaacaactccgccccattgacgcaaatgggcggtaggcgtgtacggtgggaggtctatataagcagagctcgtttagtgaaccgtcagatcgcctggagacgccatccacgctgttttgacctccatagaagacaccgggaccgatccagcctccatcggctcgcatctctccttcacgcgcccgccgccctacctgaggccgccatccacgccggttgagtcgcgttctgccgcctcccgcctgtggtgcctcctgaactgcgtccgccgtctaggtaagtttaaagctcaggtcgagaccgggcctttgtccggcgctcccttggagcctacctagactcagccggctctccacgctttgcctgaccctgcttgctcaactctagttaacggtggagggcagtgtagtctgagcagtactcgttgctgccgcgcgcgccaccagacataatagctgacagactaacagactgttcctttccatgggtcttttctgcagtcaccgtcgtcgacacgtgtgatcagatatcgcggccgctctagagatatcgccaccatgaaggccaaactgctggtgctgctgtgtacctttaccgccacctacgccgacacaatctgtatcggctaccacgccaacaatagcaccgacaccgtggatacagtgctggagaagaacgtgaccgtgacccactctgtgaacctgctggaggacagccacaatggcaagctgtgtctgctgaaaggcattgcccctctgcagctgggcaattgttctgtggccggatggattctgggcaaccccgagtgtgagctgctgatttctaaggagagctggagctacatcgtggagacccccaatcctgagaatggcacctgctaccctggctacttcgccgattacgaggagctgcgcgagcagctgtctagcgtgtccagcttcgagagattcgagatcttccccaaggagtccagctggcctaatcacacagtgacaggcgtgtctgccagctgtagccacaacggcaaaagcagcttctaccggaacctgctgtggctgacaggcaagaatggcctgtaccccaacctgagcaagagctacgtgaacaacaaggaaaaggaagtgctggtgctgtggggagtgcaccaccctcccaacatcggaaatcagcgggccctgtaccacacagagaacgcctatgtgagcgtggtgtccagccactacagcagaagattcacccccgagatcgccaagagacccaaagtgagagaccaggagggccggatcaattactactggaccctgctggagcctggcgataccatcatcttcgaggccaacggcaatctgatcgccccttggtatgcctttgccctgagcagaggctttggcagcggcatcatcacaagcaacgcccccatggatgagtgtgatgccaagtgccagacacctcagggcgccatcaatagcagcctgcccttccagaatgtgcaccctgtgaccatcggcgagtgccccaagtatgtgagaagcgccaagctgagaatggtgaccggcctgagaaacatccctcagagggagaccagaggactgtttggagccatcgccggattcatcgagggaggatggacaggcatggtggatggctggtacggctaccaccaccagaatgagcagggctctggatatgccgccgatcagaagtctacccagaacgccatcaacggcatcaccaacaaggtgaacagcgtgatcgagaagatgaacacccagtttaccgctgtgggcaaggagttcaacaagctggagcggaggatggagaacctgaacaagaaggtggacgacggctttctggacatctggacctacaatgccgaactcctggtcctcctcgagaatgagaggaccctggacttccacgacagcaacgtgaagaacctgtatgagaaggtgaagagccagctgaagaacaacgccaaggagatcggcaacggctgcttcgagttctaccacaagtgtaacaacgagtgtatggagagcgtgaagaacggcacctacgactaccctaagtacagcgaggagagcaagctgaaccgggagaagatcgatggcgtgaagctggagagcatgggcgtgtatcagatcctggccatctacagcacagtggcctcttctctggtgctgctggtgtctctgggcgccatctccttttggatgtgctccaacggcagcctgcagtgcaggatctgtatctgatgaacacgtgggatccagatctgctgtgccttctagttgccagccatctgttgtttgcccctcccccgtgccttccttgaccctggaaggtgccactcccactgtcctttcctaataaaatgaggaaattgcatcgcattgtctgagtaggtgtcattctattctggggggtggggtggggcaggacagcaagggggaggattgggaagacaatagcaggcatgctggggatgcggtgggctctatgggtacccaggtgctgaagaattgacccggttcctcctgggccagaaagaagcaggcacatccccttctctgtgacacaccctgtccacgcccctggttcttagttccagccccactcataggacactcatagctcaggagggctccgccttcaatcccacccgctaaagtacttggagcggtctctccctccctcatcagcccaccaaaccaaacctagcctccaagagtgggaagaaattaaagcaagataggctattaagtgcagagggagagaaaatgcctccaacatgtgaggaagtaatgagagaaatcatagaattttaaggccatgatttaaggccatcatggccttaatcttccgcttcctcgctcactgactcgctgcgctcggtcgttcggctgcggcgagcggtatcagctcactcaaaggcggtaatacggttatccacagaatcaggggataacgcaggaaagaacatgtgagcaaaaggccagcaaaaggccaggaaccgtaaaaaggccgcgttgctggcgtttttccataggctccgcccccctgacgagcatcacaaaaatcgacgctcaagtcagaggtggcgaaacccgacaggactataaagataccaggcgtttccccctggaagctccctcgtgcgctctcctgttccgaccctgccgcttaccggatacctgtccgcctttctcccttcgggaagcgtggcgctttctcatagctcacgctgtaggtatctcagttcggtgtaggtcgttcgctccaagctgggctgtgtgcacgaaccccccgttcagcccgaccgctgcgccttatccggtaactatcgtcttgagtccaacccggtaagacacgacttatcgccactggcagcagccactggtaacaggattagcagagcgaggtatgtaggcggtgctacagagttcttgaagtggtggcctaactacggctacactagaagaacagtatttggtatctgcgctctgctgaagccagttaccttcggaaaaagagttggtagctcttgatccggcaaacaaaccaccgctggtagcggtggtttttttgtttgcaagcagcagattacgcgcagaaaaaaaggatctcaagaagatcctttgatcttttctacggggtctgacgctcagtggaacgaaaactcacgttaagggattttggtcatgagattatcaaaaaggatcttcacctagatccttttaaattaaaaatgaagttttaaatcaatctaaagtatatatgagtaaacttggtctgacagttaccaatgcttaatcagtgaggcacctatctcagcgatctgtctatttcgttcatccatagttgcctgactcggggggggggggcgctgaggtctgcctcgtgaagaaggtgttgctgactcataccaggcctgaatcgccccatcatccagccagaaagtgagggagccacggttgatgagagctttgttgtaggtggaccagttggtgattttgaacttttgctttgccacggaacggtctgcgttgtcgggaagatgcgtgatctgatccttcaactcagcaaaagttcgatttattcaacaaagccgccgtcccgtcaagtcagcgtaatgctctgccagtgttacaaccaattaaccaattctgattagaaaaactcatcgagcatcaaatgaaactgcaatttattcatatcaggattatcaataccatatttttgaaaaagccgtttctgtaatgaaggagaaaactcaccgaggcagttccataggatggcaagatcctggtatcggtctgcgattccgactcgtccaacatcaatacaacctattaatttcccctcgtcaaaaataaggttatcaagtgagaaatcaccatgagtgacgactgaatccggtgagaatggcaaaagcttatgcatttctttccagacttgttcaacaggccagccattacgctcgtcatcaaaatcactcgcatcaaccaaaccgttattcattcgtgattgcgcctgagcgagacgaaatacgcgatcgctgttaaaaggacaattacaaacaggaatcgaatgcaaccggcgcaggaacactgccagcgcatcaacaatattttcacctgaatcaggatattcttctaatacctggaatgctgttttcccggggatcgcagtggtgagtaaccatgcatcatcaggagtacggataaaatgcttgatggtcggaagaggcataaattccgtcagccagtttagtctgaccatctcatctgtaacatcattggcaacgctacctttgccatgtttcagaaacaactctggcgcatcgggcttcccatacaatcgatagattgtcgcacctgattgcccgacattatcgcgagcccatttatacccatataaatcagcatccatgttggaatttaatcgcggcctcgagcaagacgtttcccgttgaatatggctcataacaccccttgtattactgtttatgtaagcagacagttttattgttcatgatgatatatttttatcttgtgcaatgtaacatcagagattttgagacacaacgtggctttccccccccccccattattgaagcatttatcagggttattgtctcatgagcggatacatatttgaatgtatttagaaaaataaacaaataggggttccgcgcacatttccccgaaaagtgccacctgacgtctaagaaaccattattatcatgacattaacctataaaaataggcgtatcacgaggccctttcgtc

SEQ ID NO: 57 - DNA, 6119 bp, Artificial Sequence
  Plasmid DNA: 53331
tcgcgcgtttcggtgatgacggtgaaaacctctgacacatgcagctcccggagacggtcacagcttgtctgtaagcggatgccgggagcagacaagcccgtcagggcgcgtcagcgggtgttggcgggtgtcggggctggcttaactatgcggcatcagagcagattgtactgagagtgcaccatatgcggtgtgaaataccgcacagatgcgtaaggagaaaataccgcatcagattggctattggccattgcatacgttgtatccatatcataatatgtacatttatattggctcatgtccaacattaccgccatgttgacattgattattgactagttattaatagtaatcaattacggggtcattagttcatagcccatatatggagttccgcgttacataacttacggtaaatggcccgcctggctgaccgcccaacgacccccgcccattgacgtcaataatgacgtatgttcccatagtaacgccaatagggactttccattgacgtcaatgggtggagtatttacggtaaactgcccacttggcagtacatcaagtgtatcatatgccaagtacgccccctattgacgtcaatgacggtaaatggcccgcctggcattatgcccagtacatgaccttatgggactttcctacttggcagtacatctacgtattagtcatcgctattaccatggtgatgcggttttggcagtacatcaatgggcgtggatagcggtttgactcacggggatttccaagtctccaccccattgacgtcaatgggagtttgttttggcaccaaaatcaacgggactttccaaaatgtcgtaacaactccgccccattgacgcaaatgggcggtaggcgtgtacggtgggaggtctatataagcagagctcgtttagtgaaccgtcagatcgcctggagacgccatccacgctgttttgacctccatagaagacaccgggaccgatccagcctccatcggctcgcatctctccttcacgcgcccgccgccctacctgaggccgccatccacgccggttgagtcgcgttctgccgcctcccgcctgtggtgcctcctgaactgcgtccgccgtctaggtaagtttaaagctcaggtcgagaccgggcctttgtccggcgctcccttggagcctacctagactcagccggctctccacgctttgcctgaccctgcttgctcaactctagttaacggtggagggcagtgtagtctgagcagtactcgttgctgccgcgcgcgccaccagacataatagctgacagactaacagactgttcctttccatgggtcttttctgcagtcaccgtcgtcgacacgtgtgatcagatatcgcggccgctctagagatatcgccaccatgaaggccaaactgctggtgctgctgtgtacctttaccgccacctacgccgacacaatctgtatcggctaccacgccaacaatagcaccgacaccgtggatacagtgctggagaagaacgtgaccgtgacccactctgtgaacctgctggaggacagccacaatggcaagctgtgtctgctgaaaggcattgcccctctgcagctgggcaattgttctgtggccggatggattctgggcaaccccgagtgtgagctgctgatttctaaggagagctggagctacatcgtggagacccccaatcctgagaatggcacctgctaccctggctacttcgccgattacgaggagctgcgcgagcagctgtctagcgtgtccagcttcgagagattcgagatcttccccaaggagtccagctggcctaatcacacagtgacaggcgtgtctgccagctgtagccacaacggcaaaagcagcttctaccggaacctgctgtggctgacaggcaagaatggcctgtaccccaacctgagcaagagctacgtgaacaacaaggaaaaggaagtgctggtgctgtggggagtgcaccaccctcccaacatcggaaatcagcgggccctgtaccacacagagaacgcctatgtgagcgtggtgtccagccactacagcagaagattcacccccgagatcgccaagagacccaaagtgagagaccaggagggccggatcaattactactggaccctgctggagcctggcgataccatcatcttcgaggccaacggcaatctgatcgccccttggtatgcctttgccctgagcagaggctttggcagcggcatcatcacaagcaacgcccccatggatgagtgtgatgccaagtgccagacacctcagggcgccatcaatagcagcctgcccttccagaatgtgcaccctgtgaccatcggcgagtgccccaagtatgtgagaagcgccaagctgagaatggtgaccggcctgagaaacatccctcagagggagaccagaggactgtttggagccatcgccggattcatcgagggaggatggacaggcatggtggatggctggtacggctaccaccaccagaatgagcagggctctggatatgccgccgatcagaagtctacccagaacgccatcaacggcatcaccaacaaggtgaacagcgtgatcgagaagatgaacacccagtttaccgctgtgggcaaggagttcaacaagctggagcggaggatggagaacctgaacaagaaggtggacgacggctttctggacatctggacctacaatgccgaactcctggtcctcctcgagaatgagaggaccctggacttccacgacagcaacgtgaagaacctgtatgagaaggtgaagagccagctgaagaacaacgccaaggagatcggcaacggctgcttcgagttctaccacaagtgtaacaacgagtgtatggagagcgtgaagaacggcacctacgactaccctaagtacagcgaggagagcaagctgaaccgggagaagatcgatagcggcagactggtgcctagaggatctcctggcagcggatatattcctgaggcccctagagatggacaggcctatgtgagaaaggatggcgaatgggtgctgctgtctacatttctgggacaccaccatcaccaccattgatgaacacgtgggatccagatctgctgtgccttctagttgccagccatctgttgtttgcccctcccccgtgccttccttgaccctggaaggtgccactcccactgtcctttcctaataaaatgaggaaattgcatcgcattgtctgagtaggtgtcattctattctggggggtggggtggggcaggacagcaagggggaggattgggaagacaatagcaggcatgctggggatgcggtgggctctatgggtacccaggtgctgaagaattgacccggttcctcctgggccagaaagaagcaggcacatccccttctctgtgacacaccctgtccacgcccctggttcttagttccagccccactcataggacactcatagctcaggagggctccgccttcaatcccacccgctaaagtacttggagcggtctctccctccctcatcagcccaccaaaccaaacctagcctccaagagtgggaagaaattaaagcaagataggctattaagtgcagagggagagaaaatgcctccaacatgtgaggaagtaatgagagaaatcatagaattttaaggccatgatttaaggccatcatggccttaatcttccgcttcctcgctcactgactcgctgcgctcggtcgttcggctgcggcgagcggtatcagctcactcaaaggcggtaatacggttatccacagaatcaggggataacgcaggaaagaacatgtgagcaaaaggccagcaaaaggccaggaaccgtaaaaaggccgcgttgctggcgtttttccataggctccgcccccctgacgagcatcacaaaaatcgacgctcaagtcagaggtggcgaaacccgacaggactataaagataccaggcgtttccccctggaagctccctcgtgcgctctcctgttccgaccctgccgcttaccggatacctgtccgcctttctcccttcgggaagcgtggcgctttctcatagctcacgctgtaggtatctcagttcggtgtaggtcgttcgctccaagctgggctgtgtgcacgaaccccccgttcagcccgaccgctgcgccttatccggtaactatcgtcttgagtccaacccggtaagacacgacttatcgccactggcagcagccactggtaacaggattagcagagcgaggtatgtaggcggtgctacagagttcttgaagtggtggcctaactacggctacactagaagaacagtatttggtatctgcgctctgctgaagccagttaccttcggaaaaagagttggtagctcttgatccggcaaacaaaccaccgctggtagcggtggtttttttgtttgcaagcagcagattacgcgcagaaaaaaaggatctcaagaagatcctttgatcttttctacggggtctgacgctcagtggaacgaaaactcacgttaagggattttggtcatgagattatcaaaaaggatcttcacctagatccttttaaattaaaaatgaagttttaaatcaatctaaagtatatatgagtaaacttggtctgacagttaccaatgcttaatcagtgaggcacctatctcagcgatctgtctatttcgttcatccatagttgcctgactcggggggggggggcgctgaggtctgcctcgtgaagaaggtgttgctgactcataccaggcctgaatcgccccatcatccagccagaaagtgagggagccacggttgatgagagctttgttgtaggtggaccagttggtgattttgaacttttgctttgccacggaacggtctgcgttgtcgggaagatgcgtgatctgatccttcaactcagcaaaagttcgatttattcaacaaagccgccgtcccgtcaagtcagcgtaatgctctgccagtgttacaaccaattaaccaattctgattagaaaaactcatcgagcatcaaatgaaactgcaatttattcatatcaggattatcaataccatatttttgaaaaagccgtttctgtaatgaaggagaaaactcaccgaggcagttccataggatggcaagatcctggtatcggtctgcgattccgactcgtccaacatcaatacaacctattaatttcccctcgtcaaaaataaggttatcaagtgagaaatcaccatgagtgacgactgaatccggtgagaatggcaaaagcttatgcatttctttccagacttgttcaacaggccagccattacgctcgtcatcaaaatcactcgcatcaaccaaaccgttattcattcgtgattgcgcctgagcgagacgaaatacgcgatcgctgttaaaaggacaattacaaacaggaatcgaatgcaaccggcgcaggaacactgccagcgcatcaacaatattttcacctgaatcaggatattcttctaatacctggaatgctgttttcccggggatcgcagtggtgagtaaccatgcatcatcaggagtacggataaaatgcttgatggtcggaagaggcataaattccgtcagccagtttagtctgaccatctcatctgtaacatcattggcaacgctacctttgccatgtttcagaaacaactctggcgcatcgggcttcccatacaatcgatagattgtcgcacctgattgcccgacattatcgcgagcccatttatacccatataaatcagcatccatgttggaatttaatcgcggcctcgagcaagacgtttcccgttgaatatggctcataacaccccttgtattactgtttatgtaagcagacagttttattgttcatgatgatatatttttatcttgtgcaatgtaacatcagagattttgagacacaacgtggctttccccccccccccattattgaagcatttatcagggttattgtctcatgagcggatacatatttgaatgtatttagaaaaataaacaaataggggttccgcgcacatttccccgaaaagtgccacctgacgtctaagaaaccattattatcatgacattaacctataaaaataggcgtatcacgaggccctttcgtc

SEQ ID NO: 58 - DNA, 11386 bp, Artificial Sequence
  Plasmid DNA: 53503
aagctttactcgtaaagcgagttgaaggatcatatttagttgcgtttatgagataagattgaaagcacgtgtaaaatgtttcccgcgcgttggcacaactatttacaatgcggccaagttataaaagattctaatctgatatgttttaaaacacctttgcggcccgagttgtttgcgtacgtgactagcgaagaagatgtgtggaccgcagaacagatagtaaaacaaaaccctagtattggagcaataatcgatttaaccaacacgtctaaatattatgatggtgtgcattttttgcgggcgggcctgttatacaaaaaaattcaagtacctggccagactttgccgcctgaaagcatagttcaagaatttattgacacggtaaaagaatttacagaaaagtgtcccggcatgttggtgggcgtgcactgcacacacggtattaatcgcaccggttacatggtgtgcagatatttaatgcacaccctgggtattgcgccgcaggaagccatagatagattcgaaaaagccagaggtcacaaaattgaaagacaaaattacgttcaagatttattaatttaattaatattatttgcattctttaacaaatactttatcctattttcaaattgttgcgcttcttccagcgaaccaaaactatgcttcgcttgctccgtttagcttgtagccgatcagtggcgttgttccaatcgacggtaggattaggccggatattctccaccacaatgttggcaacgttgatgttacgtttatgcttttggttttccacgtacgtcttttggccggtaatagccgtaaacgtagtgccgtcgcgcgtcacgcacaacaccggatgtttgcgcttgtccgcggggtattgaaccgcgcgatccgacaaatccaccactttggcaactaaatcggtgacctgcgcgtcttttttctgcattatttcgtctttcttttgcatggtttcctggaagccggtgtacatgcggtttagatcagtcatgacgcgcgtgacctgcaaatctttggcctcgatctgcttgtccttgatggcaacgatgcgttcaataaactcttgttttttaacaagttcctcggttttttgcgccaccaccgcttgcagcgcgtttgtgtgctcggtgaatgtcgcaatcagcttagtcaccaactgtttgctctcctcctcccgttgtttgatcgcgggatcgtacttgccggtgcagagcacttgaggaattacttcttctaaaagccattcttgtaattctatggcgtaaggcaatttggacttcataatcagctgaatcacgccggatttagtaatgagcactgtatgcggctgcaaatacagcgggtcgccccttttcacgacgctgttagaggtagggcccccattttggatggtctgctcaaataacgatttgtatttattgtctacatgaacacgtatagctttatcacaaactgtatattttaaactgttagcgacgtccttggccacgaaccggacctgttggtcgcgctctagcacgtaccgcaggttgaacgtatcttctccaaatttaaattctccaattttaacgcgagccattttgatacacgtgtgtcgattttgcaacaactattgttttttaacgcaaactaaacttattgtggtaagcaataattaaatatgggggaacatgcgccgctacaacactcgtcgttatgaacgcagacggcgccggtctcggcgcaagcggctaaaacgtgttgcgcgttcaacgcggcaaacatcgcaaaagccaatagtacagttttgatttgcatattaacggcgattttttaaattatcttatttaataaatagttatgacgcctacaactccccgcccgcgttgactcgctgcacctcgagcagttcgttgacgccttcctccgtgtggccgaacacgtcgagcgggtggtcgatgaccagcggcgtgccgcacgcgacgcacaagtatctgtacaccgaatgatcgtcgggcgaaggcacgtcggcctccaagtggcaatattggcaaattcgaaaatatatacagttgggttgtttgcgcatatctatcgtggcgttgggcatgtacgtccgaacgttgatttgcatgcaagccgaaattaaatcattgcgattagtgcgattaaaacgttgtacatcctcgcttttaatcatgccgtcgattaaatcgcgcaatcgagtcaagtgatcaaagtgtggaataatgttttctttgtattcccgagtcaagcgcagcgcgtattttaacaaactagccatcttgtaagttagtttcatttaatgcaactttatccaataatatattatgtatcgcacgtcaagaattaacaatgcgcccgttgtcgcatctcaacacgactatgatagagatcaaataaagcgcgaattaaatagcttgcgacgcaacgtgcacgatctgtgcacgcgttccggcacgagctttgattgtaataagtttttacgaagcgatgacatgacccccgtagtgacaacgatcacgcccaaaagaactgccgactacaaaattaccgagtatgtcggtgacgttaaaactattaagccatccaatcgaccgttagtcgaatcaggaccgctggtgcgagaagccgcgaagtatggcgaatgcatcgtataacgtgtggagtccgctcattagagcgtcatgtttagacaagaaagctacatatttaattgatcccgatgattttattgataaattgaccctaactccatacacggtattctacaatggcggggttttggtcaaaatttccggactgcgattgtacatgctgttaacggctccgcccactattaatgaaattaaaaattccaattttaaaaaacgcagcaagagaaacatttgtatgaaagaatgcgtagaaggaaagaaaaatgtcgtcgacatgctgaacaacaagattaatatgcctccgtgtataaaaaaaatattgaacgatttgaaagaaaacaatgtaccgcgcggcggtatgtacaggaagaggtttatactaaactgttacattgcaaacgtggtttcgtgtgccaagtgtgaaaaccgatgtttaatcaaggctctgacgcatttctacaaccacgactccaagtgtgtgggtgaagtcatgcatcttttaatcaaatcccaagatgtgtataaaccaccaaactgccaaaaaatgaaaactgtcgacaagctctgtccgtttgctggcaactgcaagggtctcaatcctatttgtaattattgaataataaaacaattataaatgctaaatttgttttttattaacgatacaaaccaaacgcaacaagaacatttgtagtattatctataattgaaaacgcgtagttataatcgctgaggtaatatttaaaatcattttcaaatgattcacagttaatttgcgacaatataattttattttcacataaactagacgccttgtcgtcttcttcttcgtattccttctctttttcatttttctcctcataaaaattaacatagttattatcgtatccatatatgtatctatcgtatagagtaaattttttgttgtcataaatatatatgtcttttttaatggggtgtatagtaccgctgcgcatagtttttctgtaatttacaacagtgctattttctggtagttcttcggagtgtgttgctttaattattaaatttatataatcaatgaatttgggatcgtcggttttgtacaatatgttgccggcatagtacgcagcttcttctagttcaattacaccattttttagcagcaccggattaacataactttccaaaatgttgtacgaaccgttaaacaaaaacagttcacctcccttttctatactattgtctgcgagcagttgtttgttgttaaaaataacagccattgtaatgagacgcacaaactaatatcacaaactggaaatgtctatcaatatatagttgctgatatcatggagataattaaaatgataaccatctcgcaaataaataagtattttactgttttcgtaacagttttgtaataaaaaaacctataaatattccggattattcataccgtcccaccatcgggcgcggatctatgctactagtaaatcagtcacaccaaggcttcaataaggaacacacaagcaagatggtaagcgctattgttttatatgtgcttttggcggcggcggcgcattctgcctttgcggcggatcccggggacacaatctgtatcggctaccacgccaacaatagcaccgacaccgtggatacagtgctggagaagaacgtgaccgtgacccactctgtgaacctgctggaggacagccacaatggcaagctgtgtctgctgaaaggcattgcccctctgcagctgggcaattgttctgtggccggatggattctgggcaaccccgagtgtgagctgctgatttctaaggagagctggagctacatcgtggagacccccaatcctgagaatggcacctgctaccctggctacttcgccgattacgaggagctgcgcgagcagctgtctagcgtgtccagcttcgagagattcgagatcttccccaaggagtccagctggcctaatcacacagtgacaggcgtgtctgccagctgtagccacaacggcaaaagcagcttctaccggaacctgctgtggctgacaggcaagaatggcctgtaccccaacctgagcaagagctacgtgaacaacaaggaaaaggaagtgctggtgctgtggggagtgcaccaccctcccaacatcggaaatcagcgggccctgtaccacacagagaacgcctatgtgagcgtggtgtccagccactacagcagaagattcacccccgagatcgccaagagacccaaagtgagagaccaggagggccggatcaattactactggaccctgctggagcctggcgataccatcatcttcgaggccaacggcaatctgatcgccccttggtatgcctttgccctgagcagaggctttggcagcggcatcatcacaagcaacgcccccatggatgagtgtgatgccaagtgccagacacctcagggcgccatcaatagcagcctgcccttccagaatgtgcaccctgtgaccatcggcgagtgccccaagtatgtgagaagcgccaagctgagaatggtgaccggcctgagaaacatccctcagagggagaccagaggactgtttggagccatcgccggattcatcgagggaggatggacaggcatggtggatggctggtacggctaccaccaccagaatgagcagggctctggatatgccgccgatcagaagtctacccagaacgccatcaacggcatcaccaacaaggtgaacagcgtgatcgagaagatgaacacccagtttaccgctgtgggcaaggagttcaacaagctggagcggaggatggagaacctgaacaagaaggtggacgacggctttctggacatctggacctacaatgccgaactcctggtcctcctcgagaatgagaggaccctggacttccacgacagcaacgtgaagaacctgtatgagaaggtgaagagccagctgaagaacaacgccaaggagatcggcaacggctgcttcgagttctaccacaagtgtaacaacgagtgtatggagagcgtgaagaacggcacctacgactaccctaagtacagcgaggagagcaagctgaaccgggagaagatcgatagcggcagactggtgcctagaggatctcctggcagcggatatattcctgaggcccctagagatggacaggcctatgtgagaaaggatggcgaatgggtgctgctgtctacatttctgggacaccaccatcaccaccattgatgagcggccgctgcagatctgatcctttcctgggacccggcaagaaccaaaaactcactctcttcaaggaaatccgtaatgttaaacccgacacgatgaagcttgtcgttggatggaaaggaaaagagttctacagggaaacttggacccgcttcatggaagacagcttccccattgttaacgaccaagaagtgatggatgttttccttgttgtcaacatgcgtcccactagacccaaccgttgttacaaattcctggcccaacacgctctgcgttgcgaccccgactatgtacctcatgacgtgattaggatcgtcgagccttcatgggtgggcagcaacaacgagtaccgcatcagcctggctaagaagggcggcggctgcccaataatgaaccttcactctgagtacaccaactcgttcgaacagttcatcgatcgtgtcatctgggagaacttctacaagcccatcgtttacatcggtaccgactctgctgaagaggaggaaattctccttgaagtttccctggtgttcaaagtaaaggagtttgcaccagacgcacctctgttcactggtccggcgtattaaaacacgatacattgttattagtacatttattaagcgctagattctgtgcgttgttgatttacagacaattgttgtacgtattttaataattcattaaatttataatctttagggtggtatgttagagcgaaaatcaaatgattttcagcgtctttatatctgaatttaaatattaaatcctcaatagatttgtaaaataggtttcgattagtttcaaacaagggttgtttttccgaaccgatggctggactatctaatggattttcgctcaacgccacaaaacttgccaaatcttgtagcagcaatctagctttgtcgatattcgtttgtgttttgttttgtaataaaggttcgacgtcgttcaaaatattatgcgcttttgtatttctttcatcactgtcgttagtgtacaattgactcgacgtaaacacgttaaataaagcttggacatatttaacatcgggcgtgttagctttattaggccgattatcgtcgtcgtcccaaccctcgtcgttagaagttgcttccgaagacgattttgccatagccacacgacgcctattaattgtgtcggctaacacgtccgcgatcaaatttgtagttgagctttttggaattatttctgattgcgggcgtttttgggcgggtttcaatctaactgtgcccgattttaattcagacaacacgttagaaagcgatggtgcaggcggtggtaacatttcagacggcaaatctactaatggcggcggtggtggagctgatgataaatctaccatcggtggaggcgcaggcggggctggcggcggaggcggaggcggaggtggtggcggtgatgcagacggcggtttaggctcaaatgtctctttaggcaacacagtcggcacctcaactattgtactggtttcgggcgccgtttttggtttgaccggtctgagacgagtgcgatttttttcgtttctaatagcttccaacaattgttgtctgtcgtctaaaggtgcagcgggttgaggttccgtcggcattggtggagcgggcggcaattcagacatcgatggtggtggtggtggtggaggcgctggaatgttaggcacgggagaaggtggtggcggcggtgccgccggtataatttgttctggtttagtttgttcgcgcacgattgtgggcaccggcgcaggcgccgctggctgcacaacggaaggtcgtctgcttcgaggcagcgcttggggtggtggcaattcaatattataattggaatacaaatcgtaaaaatctgctataagcattgtaatttcgctatcgtttaccgtgccgatatttaacaaccgctcaatgtaagcaattgtattgtaaagagattgtctcaagctccgcacgccgataacaagccttttcatttttactacagcattgtagtggcgagacacttcgctgtcgtcgacgtacatgtatgctttgttgtcaaaaacgtcgttggcaagctttaaaatatttaaaagaacatctctgttcagcaccactgtgttgtcgtaaatgttgtttttgataatttgcgcttccgcagtatcgacacgttcaaaaaattgatgcgcatcaattttgttgttcctattattgaataaataagattgtacagattcatatctacgattcgtcatggccaccacaaatgctacgctgcaaacgctggtacaattttacgaaaactgcaaaaacgtcaaaactcggtataaaataatcaacgggcgctttggcaaaatatctattttatcgcacaagcccactagcaaattgtatttgcagaaaacaatttcggcgcacaattttaacgctgacgaaataaaagttcaccagttaatgagcgaccacccaaattttataaaaatctattttaatcacggttccatcaacaaccaagtgatcgtgatggactacattgactgtcccgatttatttgaaacactacaaattaaaggcgagctttcgtaccaacttgttagcaatattattagacagctgtgtgaagcgctcaacgatttgcacaagcacaatttcatacacaacgacataaaactcgaaaatgtcttatatttcgaagcacttgatcgcgtgtatgtttgcgattacggattgtgcaaacacgaaaactcacttagcgtgcacgacggcacgttggagtattttagtccggaaaaaattcgacacacaactatgcacgtttcgtttgactggtacgcggcgtgttaacatacaagttgctaaccggcggttcgtaatcatggtcatagctgtttcctgtgtgaaattgttatccgctcacaattccacacaacatacgagccggaagcataaagtgtaaagcctggggtgcctaatgagtgagctaactcacattaattgcgttgcgctcactgcccgctttccagtcgggaaacctgtcgtgccagctgcattaatgaatcggccaacgcgcggggagaggcggtttgcgtattgggcgctcttccgcttcctcgctcactgactcgctgcgctcggtcgttcggctgcggcgagcggtatcagctcactcaaaggcggtaatacggttatccacagaatcaggggataacgcaggaaagaacatgtgagcaaaaggccagcaaaaggccaggaaccgtaaaaaggccgcgttgctggcgtttttccataggctccgcccccctgacgagcatcacaaaaatcgacgctcaagtcagaggtggcgaaacccgacaggactataaagataccaggcgtttccccctggaagctccctcgtgcgctctcctgttccgaccctgccgcttaccggatacctgtccgcctttctcccttcgggaagcgtggcgctttctcatagctcacgctgtaggtatctcagttcggtgtaggtcgttcgctccaagctgggctgtgtgcacgaaccccccgttcagcccgaccgctgcgccttatccggtaactatcgtcttgagtccaacccggtaagacacgacttatcgccactggcagcagccactggtaacaggattagcagagcgaggtatgtaggcggtgctacagagttcttgaagtggtggcctaactacggctacactagaaggacagtatttggtatctgcgctctgctgaagccagttaccttcggaaaaagagttggtagctcttgatccggcaaacaaaccaccgctggtagcggtggtttttttgtttgcaagcagcagattacgcgcagaaaaaaaggatctcaagaagatcctttgatcttttctacggggtctgacgctcagtggaacgaaaactcacgttaagggattttggtcatgagattatcaaaaaggatcttcacctagatccttttaaattaaaaatgaagttttaaatcaatctaaagtatatatgagtaaacttggtctgacagttaccaatgcttaatcagtgaggcacctatctcagcgatctgtctatttcgttcatccatagttgcctgactccccgtcgtgtagataactacgatacgggagggcttaccatctggccccagtgctgcaatgataccgcgagacccacgctcaccggctccagatttatcagcaataaaccagccagccggaagggccgagcgcagaagtggtcctgcaactttatccgcctccatccagtctattaattgttgccgggaagctagagtaagtagttcgccagttaatagtttgcgcaacgttgttgccattgctacaggcatcgtggtgtcacgctcgtcgtttggtatggcttcattcagctccggttcccaacgatcaaggcgagttacatgatcccccatgttgtgcaaaaaagcggttagctccttcggtcctccgatcgttgtcagaagtaagttggccgcagtgttatcactcatggttatggcagcactgcataattctcttactgtcatgccatccgtaagatgcttttctgtgactggtgagtactcaaccaagtcattctgagaatagtgtatgcggcgaccgagttgctcttgcccggcgtcaatacgggataataccgcgccacatagcagaactttaaaagtgctcatcattggaaaacgttcttcggggcgaaaactctcaaggatcttaccgctgttgagatccagttcgatgtaacccactcgtgcacccaactgatcttcagcatcttttactttcaccagcgtttctgggtgagcaaaaacaggaaggcaaaatgccgcaaaaaagggaataagggcgacacggaaatgttgaatactcatactcttcctttttcaatattattgaagcatttatcagggttattgtctcatgagcggatacatatttgaatgtatttagaaaaataaacaaataggggttccgcgcacatttccccgaaaagtgccacctgacgtctaagaaaccattattatcatgacattaacctataaaaataggcgtatcacgaggccctttcgtctcgcgcgtttcggtgatgacggtgaaaacctctgacacatgcagctcccggagacggtcacagcttgtctgtaagcggatgccgggagcagacaagcccgtcagggcgcgtcagcgggtgttggcgggtgtcggggctggcttaactatgcggcatcagagcagattgtactgagagtgcaccatatgcggtgtgaaataccgcacagatgcgtaaggagaaaataccgcatcaggcgccattcgccattcaggctgcgcaactgttgggaagggcgatcggtgcgggcctcttcgctattacgccagctggcgaaagggggatgtgctgcaaggcgattaagttgggtaacgccagggttttcccagtcacgacgttgtaaaacgacggccagtgcc

SEQ ID NO: 59 - DNA, 4615 bp, Artificial Sequence
  Plasmid DNA: 51490
ctaaattgtaagcgttaatattttgttaaaattcgcgttaaatttttgttaaatcagctcattttttaaccaataggccgaaatcggcaaaatcccttataaatcaaaagaatagaccgagatagggttgagtgttgttccagtttggaacaagagtccactattaaagaacgtggactccaacgtcaaagggcgaaaaaccgtctatcagggcgatggcccactacgtgaaccatcaccctaatcaagttttttggggtcgaggtgccgtaaagcactaaatcggaaccctaaagggagcccccgatttagagcttgacggggaaagccggcgaacgtggcgagaaaggaagggaagaaagcgaaaggagcgggcgctagggcgctggcaagtgtagcggtcacgctgcgcgtaaccaccacacccgccgcgcttaatgcgccgctacagggcgcgtcccattcgccattcaggctgcgcaactgttgggaagggcgatcggtgcgggcctcttcgctattacgccagctggcgaaagggggatgtgctgcaaggcgattaagttgggtaacgccagggttttcccagtcacgacgttgtaaaacgacggccagtgagcgcgcgtaatacgactcactatagggcgaattgggtaccaaatctagagatatcgccaccatggagaaaacagtgctgctgctggccacagtgtctctggtgaagagcgaccagatctgtattggctaccacgccaacaattctacagagcaggtggacaccatcatggagaagaatgtgacagtgacacacgcccaggatattctggagagaacccacaatggcaagctgtgtgatctgaatggcgtgaagcctctgatcctgagagattgttctgtggccggatggctgctgggaaatcccatgtgtgacgagttcatcaatgtgcctgagtggagctatatcgtggagaaagccagccctgccaatgatctgtgttaccccggcaacttcaacgattacgaggagctgaaacacctgctgtccaggatcaatcacttcgagaagatccagatcatccctaagagcagctggtctaatcacgatgccagctctggagtgtctagcgcctgtccttatctgggcagaagcagcttcttcagaaacgtggtgtggctgatcaagaagaatagcgcctaccccacaatcaagcggagctacaacaacaccaaccaggaagatctgctggtgctgtggggaattcaccaccctaatgatgccgccgaacagacaaagctgtaccagaaccccaccacatatatctctgtgggcaccagcacactgaatcagagactggtgcctgagattgccacaagacctaaggtgaacggccagtctggcagaatggagttcttctggaccatcctgaagccaaacgacgccatcaacttcgagagcaacggcaatttcatcgcccctgagtacgcctataagatcgtgaagaagggcgatagcaccatcatgaagagcgagctggagtacggcaactgtaataccaagtgccagacacctatgggcgccatcaatagctctatgcccttccacaatatccaccctctgacaatcggcgagtgtcctaagtacgtgaagagcaacagactggtgctggccaccggactgagaaatacacctcagagagagcggagacggaagaaaagaggactgtttggagccatcgccggctttattgagggaggatggcagggaatggtggatggctggtatggctatcaccacagcaatgagcagggatctggatatgccgccgataaggagtctacacagaaggccattgacggcgtgacaaacaaggtgaacagcatcatcaacaagatgaacacccagtttgaagctgtgggcagagagttcaacaacctggagcggagaatcgagaacctgaacaagaagatggaggacggctttctggatgtgtggacctataatgccgaactgctcgtgctgatggagaacgagagaaccctggatttccacgacagcaacgtgaagaacctgtacgacaaagtgagactgcagctgagagataatgccaaggaactgggcaatggctgcttcgagttctaccacaagtgtgacaacgagtgtatggagagcgtgaagaacggcacctacgattaccctcagtactctgaggaagccagactgaacagagaggagatctctggcgtgaaactggagagcatgggcacataccagatcctgagcatctatagcacagtggcctcttctctggccctggccattatggtggccggactgtctctgtggatgtgtagcaatggcagcctgcagtgcagaatctgtatctgatgaacacgtgggatccgtaaaggagctccagcttttgttccctttagtgagggttaattgcgcgcttggcgtaatcatggtcatagctgtttcctgtgtgaaattgttatccgctcacaattccacacaacatacgagccggaagcataaagtgtaaagcctggggtgcctaatgagtgagctaactcacattaattgcgttgcgctcactgcccgctttccagtcgggaaacctgtcgtgccagctgcattaatgaatcggccaacgcgcggggagaggcggtttgcgtattgggcgctcttccgcttcctcgctcactgactcgctgcgctcggtcgttcggctgcggcgagcggtatcagctcactcaaaggcggtaatacggttatccacagaatcaggggataacgcaggaaagaacatgtgagcaaaaggccagcaaaaggccaggaaccgtaaaaaggccgcgttgctggcgtttttccataggctccgcccccctgacgagcatcacaaaaatcgacgctcaagtcagaggtggcgaaacccgacaggactataaagataccaggcgtttccccctggaagctccctcgtgcgctctcctgttccgaccctgccgcttaccggatacctgtccgcctttctcccttcgggaagcgtggcgctttctcatagctcacgctgtaggtatctcagttcggtgtaggtcgttcgctccaagctgggctgtgtgcacgaaccccccgttcagcccgaccgctgcgccttatccggtaactatcgtcttgagtccaacccggtaagacacgacttatcgccactggcagcagccactggtaacaggattagcagagcgaggtatgtaggcggtgctacagagttcttgaagtggtggcctaactacggctacactagaaggacagtatttggtatctgcgctctgctgaagccagttaccttcggaaaaagagttggtagctcttgatccggcaaacaaaccaccgctggtagcggtggtttttttgtttgcaagcagcagattacgcgcagaaaaaaaggatctcaagaagatcctttgatcttttctacggggtctgacgctcagtggaacgaaaactcacgttaagggattttggtcatgagattatcaaaaaggatcttcacctagatccttttaaattaaaaatgaagttttaaatcaatctaaagtatatatgagtaaacttggtctgacagttaccaatgcttaatcagtgaggcacctatctcagcgatctgtctatttcgttcatccatagttgcctgactccccgtcgtgtagataactacgatacgggagggcttaccatctggccccagtgctgcaatgataccgcgagacccacgctcaccggctccagatttatcagcaataaaccagccagccggaagggccgagcgcagaagtggtcctgcaactttatccgcctccatccagtctattaattgttgccgggaagctagagtaagtagttcgccagttaatagtttgcgcaacgttgttgccattgctacaggcatcgtggtgtcacgctcgtcgtttggtatggcttcattcagctccggttcccaacgatcaaggcgagttacatgatcccccatgttgtgcaaaaaagcggttagctccttcggtcctccgatcgttgtcagaagtaagttggccgcagtgttatcactcatggttatggcagcactgcataattctcttactgtcatgccatccgtaagatgcttttctgtgactggtgagtactcaaccaagtcattctgagaatagtgtatgcggcgaccgagttgctcttgcccggcgtcaatacgggataataccgcgccacatagcagaactttaaaagtgctcatcattggaaaacgttcttcggggcgaaaactctcaaggatcttaccgctgttgagatccagttcgatgtaacccactcgtgcacccaactgatcttcagcatcttttactttcaccagcgtttctgggtgagcaaaaacaggaaggcaaaatgccgcaaaaaagggaataagggcgacacggaaatgttgaatactcatactcttcctttttcaatattattgaagcatttatcagggttattgtctcatgagcggatacatatttgaatgtatttagaaaaataaacaaataggggttccgcgcacatttccccgaaaagtgccac

SEQ ID NO: 60 - DNA, 4603 bp, Artificial Sequence
  Plasmid DNA: 51491
ctaaattgtaagcgttaatattttgttaaaattcgcgttaaatttttgttaaatcagctcattttttaaccaataggccgaaatcggcaaaatcccttataaatcaaaagaatagaccgagatagggttgagtgttgttccagtttggaacaagagtccactattaaagaacgtggactccaacgtcaaagggcgaaaaaccgtctatcagggcgatggcccactacgtgaaccatcaccctaatcaagttttttggggtcgaggtgccgtaaagcactaaatcggaaccctaaagggagcccccgatttagagcttgacggggaaagccggcgaacgtggcgagaaaggaagggaagaaagcgaaaggagcgggcgctagggcgctggcaagtgtagcggtcacgctgcgcgtaaccaccacacccgccgcgcttaatgcgccgctacagggcgcgtcccattcgccattcaggctgcgcaactgttgggaagggcgatcggtgcgggcctcttcgctattacgccagctggcgaaagggggatgtgctgcaaggcgattaagttgggtaacgccagggttttcccagtcacgacgttgtaaaacgacggccagtgagcgcgcgtaatacgactcactatagggcgaattgggtaccaaatctagagatatcgccaccatggagaaaacagtgctgctgctggccacagtgtctctggtgaagagcgaccagatctgtattggctaccacgccaacaattctacagagcaggtggacaccatcatggagaagaatgtgacagtgacacacgcccaggatattctggagagaacccacaatggcaagctgtgtgatctgaatggcgtgaagcctctgatcctgagagattgttctgtggccggatggctgctgggaaatcccatgtgtgacgagttcatcaatgtgcctgagtggagctatatcgtggagaaagccagccctgccaatgatctgtgttaccccggcaacttcaacgattacgaggagctgaaacacctgctgtccaggatcaatcacttcgagaagatccagatcatccctaagagcagctggtctaatcacgatgccagctctggagtgtctagcgcctgtccttatctgggcagaagcagcttcttcagaaacgtggtgtggctgatcaagaagaatagcgcctaccccacaatcaagcggagctacaacaacaccaaccaggaagatctgctggtgctgtggggaattcaccaccctaatgatgccgccgaacagacaaagctgtaccagaaccccaccacatatatctctgtgggcaccagcacactgaatcagagactggtgcctgagattgccacaagacctaaggtgaacggccagtctggcagaatggagttcttctggaccatcctgaagccaaacgacgccatcaacttcgagagcaacggcaatttcatcgcccctgagtacgcctataagatcgtgaagaagggcgatagcaccatcatgaagagcgagctggagtacggcaactgtaataccaagtgccagacacctatgggcgccatcaatagctctatgcccttccacaatatccaccctctgacaatcggcgagtgtcctaagtacgtgaagagcaacagactggtgctggccaccggactgagaaatacacctcagagagagaccagaggactgtttggagccatcgccggctttattgagggaggatggcagggaatggtggatggctggtatggctatcaccacagcaatgagcagggatctggatatgccgccgataaggagtctacacagaaggccattgacggcgtgacaaacaaggtgaacagcatcatcaacaagatgaacacccagtttgaagctgtgggcagagagttcaacaacctggagcggagaatcgagaacctgaacaagaagatggaggacggctttctggatgtgtggacctataatgccgaactgctcgtgctgatggagaacgagagaaccctggatttccacgacagcaacgtgaagaacctgtacgacaaagtgagactgcagctgagagataatgccaaggaactgggcaatggctgcttcgagttctaccacaagtgtgacaacgagtgtatggagagcgtgaagaacggcacctacgattaccctcagtactctgaggaagccagactgaacagagaggagatctctggcgtgaaactggagagcatgggcacataccagatcctgagcatctatagcacagtggcctcttctctggccctggccattatggtggccggactgtctctgtggatgtgtagcaatggcagcctgcagtgcagaatctgtatctgatgaacacgtgggatccgtaaaggagctccagcttttgttccctttagtgagggttaattgcgcgcttggcgtaatcatggtcatagctgtttcctgtgtgaaattgttatccgctcacaattccacacaacatacgagccggaagcataaagtgtaaagcctggggtgcctaatgagtgagctaactcacattaattgcgttgcgctcactgcccgctttccagtcgggaaacctgtcgtgccagctgcattaatgaatcggccaacgcgcggggagaggcggtttgcgtattgggcgctcttccgcttcctcgctcactgactcgctgcgctcggtcgttcggctgcggcgagcggtatcagctcactcaaaggcggtaatacggttatccacagaatcaggggataacgcaggaaagaacatgtgagcaaaaggccagcaaaaggccaggaaccgtaaaaaggccgcgttgctggcgtttttccataggctccgcccccctgacgagcatcacaaaaatcgacgctcaagtcagaggtggcgaaacccgacaggactataaagataccaggcgtttccccctggaagctccctcgtgcgctctcctgttccgaccctgccgcttaccggatacctgtccgcctttctcccttcgggaagcgtggcgctttctcatagctcacgctgtaggtatctcagttcggtgtaggtcgttcgctccaagctgggctgtgtgcacgaaccccccgttcagcccgaccgctgcgccttatccggtaactatcgtcttgagtccaacccggtaagacacgacttatcgccactggcagcagccactggtaacaggattagcagagcgaggtatgtaggcggtgctacagagttcttgaagtggtggcctaactacggctacactagaaggacagtatttggtatctgcgctctgctgaagccagttaccttcggaaaaagagttggtagctcttgatccggcaaacaaaccaccgctggtagcggtggtttttttgtttgcaagcagcagattacgcgcagaaaaaaaggatctcaagaagatcctttgatcttttctacggggtctgacgctcagtggaacgaaaactcacgttaagggattttggtcatgagattatcaaaaaggatcttcacctagatccttttaaattaaaaatgaagttttaaatcaatctaaagtatatatgagtaaacttggtctgacagttaccaatgcttaatcagtgaggcacctatctcagcgatctgtctatttcgttcatccatagttgcctgactccccgtcgtgtagataactacgatacgggagggcttaccatctggccccagtgctgcaatgataccgcgagacccacgctcaccggctccagatttatcagcaataaaccagccagccggaagggccgagcgcagaagtggtcctgcaactttatccgcctccatccagtctattaattgttgccgggaagctagagtaagtagttcgccagttaatagtttgcgcaacgttgttgccattgctacaggcatcgtggtgtcacgctcgtcgtttggtatggcttcattcagctccggttcccaacgatcaaggcgagttacatgatcccccatgttgtgcaaaaaagcggttagctccttcggtcctccgatcgttgtcagaagtaagttggccgcagtgttatcactcatggttatggcagcactgcataattctcttactgtcatgccatccgtaagatgcttttctgtgactggtgagtactcaaccaagtcattctgagaatagtgtatgcggcgaccgagttgctcttgcccggcgtcaatacgggataataccgcgccacatagcagaactttaaaagtgctcatcattggaaaacgttcttcggggcgaaaactctcaaggatcttaccgctgttgagatccagttcgatgtaacccactcgtgcacccaactgatcttcagcatcttttactttcaccagcgtttctgggtgagcaaaaacaggaaggcaaaatgccgcaaaaaagggaataagggcgacacggaaatgttgaatactcatactcttcctttttcaatattattgaagcatttatcagggttattgtctcatgagcggatacatatttgaatgtatttagaaaaataaacaaataggggttccgcgcacatttccccgaaaagtgccac

SEQ ID NO: 61 - DNA, 4630 bp, Artificial Sequence
  Plasmid DNA: 51492
ctaaattgtaagcgttaatattttgttaaaattcgcgttaaatttttgttaaatcagctcattttttaaccaataggccgaaatcggcaaaatcccttataaatcaaaagaatagaccgagatagggttgagtgttgttccagtttggaacaagagtccactattaaagaacgtggactccaacgtcaaagggcgaaaaaccgtctatcagggcgatggcccactacgtgaaccatcaccctaatcaagttttttggggtcgaggtgccgtaaagcactaaatcggaaccctaaagggagcccccgatttagagcttgacggggaaagccggcgaacgtggcgagaaaggaagggaagaaagcgaaaggagcgggcgctagggcgctggcaagtgtagcggtcacgctgcgcgtaaccaccacacccgccgcgcttaatgcgccgctacagggcgcgtcccattcgccattcaggctgcgcaactgttgggaagggcgatcggtgcgggcctcttcgctattacgccagctggcgaaagggggatgtgctgcaaggcgattaagttgggtaacgccagggttttcccagtcacgacgttgtaaaacgacggccagtgagcgcgcgtaatacgactcactatagggcgaattgggtaccaaatctagagatatcgccaccatggagaaaacagtgctgctgctggccacagtgtctctggtgaagagcgaccagatctgtattggctaccacgccaacaattctacagagcaggtggacaccatcatggagaagaatgtgacagtgacacacgcccaggatattctggagagaacccacaatggcaagctgtgtgatctgaatggcgtgaagcctctgatcctgagagattgttctgtggccggatggctgctgggaaatcccatgtgtgacgagttcatcaatgtgcctgagtggagctatatcgtggagaaagccagccctgccaatgatctgtgttaccccggcaacttcaacgattacgaggagctgaaacacctgctgtccaggatcaatcacttcgagaagatccagatcatccctaagagcagctggtctaatcacgatgccagctctggagtgtctagcgcctgtccttatctgggcagaagcagcttcttcagaaacgtggtgtggctgatcaagaagaatagcgcctaccccacaatcaagcggagctacaacaacaccaaccaggaagatctgctggtgctgtggggaattcaccaccctaatgatgccgccgaacagacaaagctgtaccagaaccccaccacatatatctctgtgggcaccagcacactgaatcagagactggtgcctgagattgccacaagacctaaggtgaacggccagtctggcagaatggagttcttctggaccatcctgaagccaaacgacgccatcaacttcgagagcaacggcaatttcatcgcccctgagtacgcctataagatcgtgaagaagggcgatagcaccatcatgaagagcgagctggagtacggcaactgtaataccaagtgccagacacctatgggcgccatcaatagctctatgcccttccacaatatccaccctctgacaatcggcgagtgtcctaagtacgtgaagagcaacagactggtgctggccaccggactgagaaatacacctcagagagagaccagaggactgtttggagccatcgccggctttattgagggaggatggcagggaatggtggatggctggtatggctatcaccacagcaatgagcagggatctggatatgccgccgataaggagtctacacagaaggccattgacggcgtgacaaacaaggtgaacagcatcatcaacaagatgaacacccagtttgaagctgtgggcagagagttcaacaacctggagcggagaatcgagaacctgaacaagaagatggaggacggctttctggatgtgtggacctataatgccgaactgctcgtgctgatggagaacgagagaaccctggatttccacgacagcaacgtgaagaacctgtacgacaaagtgagactgcagctgagagataatgccaaggaactgggcaatggctgcttcgagttctaccacaagtgtgacaacgagtgtatggagagcgtgaagaacggcacctacgattaccctcagtactctgaggaagccagactgaacagagaggagatctctggcgtgaaactggagagcatgggcacataccagatcagaagcctggtgcctagaggatctcctggcagcggatatattcctgaggcccctagagatggacaggcctatgtgagaaaggatggcgaatgggtgctgctgtctacatttctgggacaccaccatcaccaccattgatgaacacgtgggatccgtaaaggagctccagcttttgttccctttagtgagggttaattgcgcgcttggcgtaatcatggtcatagctgtttcctgtgtgaaattgttatccgctcacaattccacacaacatacgagccggaagcataaagtgtaaagcctggggtgcctaatgagtgagctaactcacattaattgcgttgcgctcactgcccgctttccagtcgggaaacctgtcgtgccagctgcattaatgaatcggccaacgcgcggggagaggcggtttgcgtattgggcgctcttccgcttcctcgctcactgactcgctgcgctcggtcgttcggctgcggcgagcggtatcagctcactcaaaggcggtaatacggttatccacagaatcaggggataacgcaggaaagaacatgtgagcaaaaggccagcaaaaggccaggaaccgtaaaaaggccgcgttgctggcgtttttccataggctccgcccccctgacgagcatcacaaaaatcgacgctcaagtcagaggtggcgaaacccgacaggactataaagataccaggcgtttccccctggaagctccctcgtgcgctctcctgttccgaccctgccgcttaccggatacctgtccgcctttctcccttcgggaagcgtggcgctttctcatagctcacgctgtaggtatctcagttcggtgtaggtcgttcgctccaagctgggctgtgtgcacgaaccccccgttcagcccgaccgctgcgccttatccggtaactatcgtcttgagtccaacccggtaagacacgacttatcgccactggcagcagccactggtaacaggattagcagagcgaggtatgtaggcggtgctacagagttcttgaagtggtggcctaactacggctacactagaaggacagtatttggtatctgcgctctgctgaagccagttaccttcggaaaaagagttggtagctcttgatccggcaaacaaaccaccgctggtagcggtggtttttttgtttgcaagcagcagattacgcgcagaaaaaaaggatctcaagaagatcctttgatcttttctacggggtctgacgctcagtggaacgaaaactcacgttaagggattttggtcatgagattatcaaaaaggatcttcacctagatccttttaaattaaaaatgaagttttaaatcaatctaaagtatatatgagtaaacttggtctgacagttaccaatgcttaatcagtgaggcacctatctcagcgatctgtctatttcgttcatccatagttgcctgactccccgtcgtgtagataactacgatacgggagggcttaccatctggccccagtgctgcaatgataccgcgagacccacgctcaccggctccagatttatcagcaataaaccagccagccggaagggccgagcgcagaagtggtcctgcaactttatccgcctccatccagtctattaattgttgccgggaagctagagtaagtagttcgccagttaatagtttgcgcaacgttgttgccattgctacaggcatcgtggtgtcacgctcgtcgtttggtatggcttcattcagctccggttcccaacgatcaaggcgagttacatgatcccccatgttgtgcaaaaaagcggttagctccttcggtcctccgatcgttgtcagaagtaagttggccgcagtgttatcactcatggttatggcagcactgcataattctcttactgtcatgccatccgtaagatgcttttctgtgactggtgagtactcaaccaagtcattctgagaatagtgtatgcggcgaccgagttgctcttgcccggcgtcaatacgggataataccgcgccacatagcagaactttaaaagtgctcatcattggaaaacgttcttcggggcgaaaactctcaaggatcttaccgctgttgagatccagttcgatgtaacccactcgtgcacccaactgatcttcagcatcttttactttcaccagcgtttctgggtgagcaaaaacaggaaggcaaaatgccgcaaaaaagggaataagggcgacacggaaatgttgaatactcatactcttcctttttcaatattattgaagcatttatcagggttattgtctcatgagcggatacatatttgaatgtatttagaaaaataaacaaataggggttccgcgcacatttccccgaaaagtgccac

SEQ ID NO: 62 - DNA, 4615 bp, Artificial Sequence
  Plasmid DNA: 51493
ctaaattgtaagcgttaatattttgttaaaattcgcgttaaatttttgttaaatcagctcattttttaaccaataggccgaaatcggcaaaatcccttataaatcaaaagaatagaccgagatagggttgagtgttgttccagtttggaacaagagtccactattaaagaacgtggactccaacgtcaaagggcgaaaaaccgtctatcagggcgatggcccactacgtgaaccatcaccctaatcaagttttttggggtcgaggtgccgtaaagcactaaatcggaaccctaaagggagcccccgatttagagcttgacggggaaagccggcgaacgtggcgagaaaggaagggaagaaagcgaaaggagcgggcgctagggcgctggcaagtgtagcggtcacgctgcgcgtaaccaccacacccgccgcgcttaatgcgccgctacagggcgcgtcccattcgccattcaggctgcgcaactgttgggaagggcgatcggtgcgggcctcttcgctattacgccagctggcgaaagggggatgtgctgcaaggcgattaagttgggtaacgccagggttttcccagtcacgacgttgtaaaacgacggccagtgagcgcgcgtaatacgactcactatagggcgaattgggtaccaaatctagagatatcgccaccatggagaagattgtgctgctgctggccacagtgtctctggtgaagagcgaccagatctgtattggctaccacgccaacaattctacagagcaggtggacaccatcatggagaaaaacgtgacagtgacacacgcccaggatattctggagagaacccacaatggcaagctgtgtgatctgaatggcgtgaagcctctgatcctgagagattgttctgtggccggatggctgctgggaaatcccatgtgtgacgagttcatcaatgtgcctgagtggagctatatcgtggagaaagccagccctgccaatgatctgtgttaccccggcaacttcaacgattacgaggagctgaaacacctgctgtccagaatcagccacttcgagaagatccagatcatccctaagagcagctggtctaatcacgatgccagctctggagtgtctagcgcctgtccttatctgggcaagagcagcttcttcagaaatgtggtgtggctgatcaagaagaacagcacctaccccacaatcaagcggagctacaacaacaccaaccaggaagatctgctggtgctgtggggaattcaccaccctaatgatgccgccgaacagacaaagctgtaccagaaccccaccacatatatctctgtgggcaccagcacactgaatcagagactggtgcctgagattgccacaagacctaaggtgaacggccagtctggcagaatcgagttcttctggaccatcctgaagccaaacgacgccatcaacttcgagagcaacggcaatttcatcgcccctgagtacgcctataagatcgtgaagaagggcgatagcaccatcatgaagagcgagctggagtacggcaactgtaataccaagtgccagacacctatgggcgccatcaatagctctatgcccttccacaatatccaccctctgacaatcggcgagtgtcctaagtacgtgaagagcaacagactggtgctggccaccggactgagaaatgcccctcagagagagcggagacggaagaaaagaggactgtttggagccatcgccggctttattgagggaggatggcagggaatggtggatggctggtatggctatcaccacagcaatgagcagggatctggatatgccgccgatcaggagtctacacagaaagccatcgacggcgtgacaaataaggtgaacagcatcatcaacaagatgaacacccagtttgaagctgtgggcagagagttcaacaacctggagcggagaatcgagaacctgaacaagaagatggaggacggctttctggatgtgtggacctataatgccgaactgctcgtgctgatggagaacgagagaaccctggatttccacgacagcaacgtgaagaacctgtacgacaaagtgagactgcagctgagagataatgccaaggaactgggcaatggctgcttcgagttctaccacaagtgtgacaacgagtgtatggagagcgtgaagaatggcacctacgactaccctcagtattctgaggaggccagactgaatagagaggagatcagcggcgtgaaactggaaagcatgggcacctaccagatcctgagcctgtattctacagtggcctcttctctggccctggccattatggtggccggactgtctctgtggatgtgtagcaatggcagcctgcagtgcagaatctgtatctgatgaacacgtgggatccgtaaaggagctccagcttttgttccctttagtgagggttaattgcgcgcttggcgtaatcatggtcatagctgtttcctgtgtgaaattgttatccgctcacaattccacacaacatacgagccggaagcataaagtgtaaagcctggggtgcctaatgagtgagctaactcacattaattgcgttgcgctcactgcccgctttccagtcgggaaacctgtcgtgccagctgcattaatgaatcggccaacgcgcggggagaggcggtttgcgtattgggcgctcttccgcttcctcgctcactgactcgctgcgctcggtcgttcggctgcggcgagcggtatcagctcactcaaaggcggtaatacggttatccacagaatcaggggataacgcaggaaagaacatgtgagcaaaaggccagcaaaaggccaggaaccgtaaaaaggccgcgttgctggcgtttttccataggctccgcccccctgacgagcatcacaaaaatcgacgctcaagtcagaggtggcgaaacccgacaggactataaagataccaggcgtttccccctggaagctccctcgtgcgctctcctgttccgaccctgccgcttaccggatacctgtccgcctttctcccttcgggaagcgtggcgctttctcatagctcacgctgtaggtatctcagttcggtgtaggtcgttcgctccaagctgggctgtgtgcacgaaccccccgttcagcccgaccgctgcgccttatccggtaactatcgtcttgagtccaacccggtaagacacgacttatcgccactggcagcagccactggtaacaggattagcagagcgaggtatgtaggcggtgctacagagttcttgaagtggtggcctaactacggctacactagaaggacagtatttggtatctgcgctctgctgaagccagttaccttcggaaaaagagttggtagctcttgatccggcaaacaaaccaccgctggtagcggtggtttttttgtttgcaagcagcagattacgcgcagaaaaaaaggatctcaagaagatcctttgatcttttctacggggtctgacgctcagtggaacgaaaactcacgttaagggattttggtcatgagattatcaaaaaggatcttcacctagatccttttaaattaaaaatgaagttttaaatcaatctaaagtatatatgagtaaacttggtctgacagttaccaatgcttaatcagtgaggcacctatctcagcgatctgtctatttcgttcatccatagttgcctgactccccgtcgtgtagataactacgatacgggagggcttaccatctggccccagtgctgcaatgataccgcgagacccacgctcaccggctccagatttatcagcaataaaccagccagccggaagggccgagcgcagaagtggtcctgcaactttatccgcctccatccagtctattaattgttgccgggaagctagagtaagtagttcgccagttaatagtttgcgcaacgttgttgccattgctacaggcatcgtggtgtcacgctcgtcgtttggtatggcttcattcagctccggttcccaacgatcaaggcgagttacatgatcccccatgttgtgcaaaaaagcggttagctccttcggtcctccgatcgttgtcagaagtaagttggccgcagtgttatcactcatggttatggcagcactgcataattctcttactgtcatgccatccgtaagatgcttttctgtgactggtgagtactcaaccaagtcattctgagaatagtgtatgcggcgaccgagttgctcttgcccggcgtcaatacgggataataccgcgccacatagcagaactttaaaagtgctcatcattggaaaacgttcttcggggcgaaaactctcaaggatcttaccgctgttgagatccagttcgatgtaacccactcgtgcacccaactgatcttcagcatcttttactttcaccagcgtttctgggtgagcaaaaacaggaaggcaaaatgccgcaaaaaagggaataagggcgacacggaaatgttgaatactcatactcttcctttttcaatattattgaagcatttatcagggttattgtctcatgagcggatacatatttgaatgtatttagaaaaataaacaaataggggttccgcgcacatttccccgaaaagtgccac

SEQ ID NO: 63 - DNA, 4603 bp, Artificial Sequence
  Plasmid DNA: 51494
ctaaattgtaagcgttaatattttgttaaaattcgcgttaaatttttgttaaatcagctcattttttaaccaataggccgaaatcggcaaaatcccttataaatcaaaagaatagaccgagatagggttgagtgttgttccagtttggaacaagagtccactattaaagaacgtggactccaacgtcaaagggcgaaaaaccgtctatcagggcgatggcccactacgtgaaccatcaccctaatcaagttttttggggtcgaggtgccgtaaagcactaaatcggaaccctaaagggagcccccgatttagagcttgacggggaaagccggcgaacgtggcgagaaaggaagggaagaaagcgaaaggagcgggcgctagggcgctggcaagtgtagcggtcacgctgcgcgtaaccaccacacccgccgcgcttaatgcgccgctacagggcgcgtcccattcgccattcaggctgcgcaactgttgggaagggcgatcggtgcgggcctcttcgctattacgccagctggcgaaagggggatgtgctgcaaggcgattaagttgggtaacgccagggttttcccagtcacgacgttgtaaaacgacggccagtgagcgcgcgtaatacgactcactatagggcgaattgggtaccaaatctagagatatcgccaccatggagaagattgtgctgctgctggccacagtgtctctggtgaagagcgaccagatctgtattggctaccacgccaacaattctacagagcaggtggacaccatcatggagaaaaacgtgacagtgacacacgcccaggatattctggagagaacccacaatggcaagctgtgtgatctgaatggcgtgaagcctctgatcctgagagattgttctgtggccggatggctgctgggaaatcccatgtgtgacgagttcatcaatgtgcctgagtggagctatatcgtggagaaagccagccctgccaatgatctgtgttaccccggcaacttcaacgattacgaggagctgaaacacctgctgtccagaatcagccacttcgagaagatccagatcatccctaagagcagctggtctaatcacgatgccagctctggagtgtctagcgcctgtccttatctgggcaagagcagcttcttcagaaatgtggtgtggctgatcaagaagaacagcacctaccccacaatcaagcggagctacaacaacaccaaccaggaagatctgctggtgctgtggggaattcaccaccctaatgatgccgccgaacagacaaagctgtaccagaaccccaccacatatatctctgtgggcaccagcacactgaatcagagactggtgcctgagattgccacaagacctaaggtgaacggccagtctggcagaatcgagttcttctggaccatcctgaagccaaacgacgccatcaacttcgagagcaacggcaatttcatcgcccctgagtacgcctataagatcgtgaagaagggcgatagcaccatcatgaagagcgagctggagtacggcaactgtaataccaagtgccagacacctatgggcgccatcaatagctctatgcccttccacaatatccaccctctgacaatcggcgagtgtcctaagtacgtgaagagcaacagactggtgctggccaccggactgagaaatgcccctcagagagagacaagaggactgtttggagccatcgccggctttattgagggaggatggcagggaatggtggatggctggtatggctatcaccacagcaatgagcagggatctggatatgccgccgatcaggagtctacacagaaagccatcgacggcgtgacaaataaggtgaacagcatcatcaacaagatgaacacccagtttgaagctgtgggcagagagttcaacaacctggagcggagaatcgagaacctgaacaagaagatggaggacggctttctggatgtgtggacctataatgccgaactgctcgtgctgatggagaacgagagaaccctggatttccacgacagcaacgtgaagaacctgtacgacaaagtgagactgcagctgagagataatgccaaggaactgggcaatggctgcttcgagttctaccacaagtgtgacaacgagtgtatggagagcgtgaagaatggcacctacgactaccctcagtattctgaggaggccagactgaatagagaggagatcagcggcgtgaaactggaaagcatgggcacctaccagatcctgagcctgtattctacagtggcctcttctctggccctggccattatggtggccggactgtctctgtggatgtgtagcaatggcagcctgcagtgcagaatctgtatctgatgaacacgtgggatccgtaaaggagctccagcttttgttccctttagtgagggttaattgcgcgcttggcgtaatcatggtcatagctgtttcctgtgtgaaattgttatccgctcacaattccacacaacatacgagccggaagcataaagtgtaaagcctggggtgcctaatgagtgagctaactcacattaattgcgttgcgctcactgcccgctttccagtcgggaaacctgtcgtgccagctgcattaatgaatcggccaacgcgcggggagaggcggtttgcgtattgggcgctcttccgcttcctcgctcactgactcgctgcgctcggtcgttcggctgcggcgagcggtatcagctcactcaaaggcggtaatacggttatccacagaatcaggggataacgcaggaaagaacatgtgagcaaaaggccagcaaaaggccaggaaccgtaaaaaggccgcgttgctggcgtttttccataggctccgcccccctgacgagcatcacaaaaatcgacgctcaagtcagaggtggcgaaacccgacaggactataaagataccaggcgtttccccctggaagctccctcgtgcgctctcctgttccgaccctgccgcttaccggatacctgtccgcctttctcccttcgggaagcgtggcgctttctcatagctcacgctgtaggtatctcagttcggtgtaggtcgttcgctccaagctgggctgtgtgcacgaaccccccgttcagcccgaccgctgcgccttatccggtaactatcgtcttgagtccaacccggtaagacacgacttatcgccactggcagcagccactggtaacaggattagcagagcgaggtatgtaggcggtgctacagagttcttgaagtggtggcctaactacggctacactagaaggacagtatttggtatctgcgctctgctgaagccagttaccttcggaaaaagagttggtagctcttgatccggcaaacaaaccaccgctggtagcggtggtttttttgtttgcaagcagcagattacgcgcagaaaaaaaggatctcaagaagatcctttgatcttttctacggggtctgacgctcagtggaacgaaaactcacgttaagggattttggtcatgagattatcaaaaaggatcttcacctagatccttttaaattaaaaatgaagttttaaatcaatctaaagtatatatgagtaaacttggtctgacagttaccaatgcttaatcagtgaggcacctatctcagcgatctgtctatttcgttcatccatagttgcctgactccccgtcgtgtagataactacgatacgggagggcttaccatctggccccagtgctgcaatgataccgcgagacccacgctcaccggctccagatttatcagcaataaaccagccagccggaagggccgagcgcagaagtggtcctgcaactttatccgcctccatccagtctattaattgttgccgggaagctagagtaagtagttcgccagttaatagtttgcgcaacgttgttgccattgctacaggcatcgtggtgtcacgctcgtcgtttggtatggcttcattcagctccggttcccaacgatcaaggcgagttacatgatcccccatgttgtgcaaaaaagcggttagctccttcggtcctccgatcgttgtcagaagtaagttggccgcagtgttatcactcatggttatggcagcactgcataattctcttactgtcatgccatccgtaagatgcttttctgtgactggtgagtactcaaccaagtcattctgagaatagtgtatgcggcgaccgagttgctcttgcccggcgtcaatacgggataataccgcgccacatagcagaactttaaaagtgctcatcattggaaaacgttcttcggggcgaaaactctcaaggatcttaccgctgttgagatccagttcgatgtaacccactcgtgcacccaactgatcttcagcatcttttactttcaccagcgtttctgggtgagcaaaaacaggaaggcaaaatgccgcaaaaaagggaataagggcgacacggaaatgttgaatactcatactcttcctttttcaatattattgaagcatttatcagggttattgtctcatgagcggatacatatttgaatgtatttagaaaaataaacaaataggggttccgcgcacatttccccgaaaagtgccac

SEQ ID NO: 64 - DNA, 4630 bp, Artificial Sequence
  Plasmid DNA: 51495
ctaaattgtaagcgttaatattttgttaaaattcgcgttaaatttttgttaaatcagctcattttttaaccaataggccgaaatcggcaaaatcccttataaatcaaaagaatagaccgagatagggttgagtgttgttccagtttggaacaagagtccactattaaagaacgtggactccaacgtcaaagggcgaaaaaccgtctatcagggcgatggcccactacgtgaaccatcaccctaatcaagttttttggggtcgaggtgccgtaaagcactaaatcggaaccctaaagggagcccccgatttagagcttgacggggaaagccggcgaacgtggcgagaaaggaagggaagaaagcgaaaggagcgggcgctagggcgctggcaagtgtagcggtcacgctgcgcgtaaccaccacacccgccgcgcttaatgcgccgctacagggcgcgtcccattcgccattcaggctgcgcaactgttgggaagggcgatcggtgcgggcctcttcgctattacgccagctggcgaaagggggatgtgctgcaaggcgattaagttgggtaacgccagggttttcccagtcacgacgttgtaaaacgacggccagtgagcgcgcgtaatacgactcactatagggcgaattgggtaccaaatctagagatatcgccaccatggagaagattgtgctgctgctggccacagtgtctctggtgaagagcgaccagatctgtattggctaccacgccaacaattctacagagcaggtggacaccatcatggagaaaaacgtgacagtgacacacgcccaggatattctggagagaacccacaatggcaagctgtgtgatctgaatggcgtgaagcctctgatcctgagagattgttctgtggccggatggctgctgggaaatcccatgtgtgacgagttcatcaatgtgcctgagtggagctatatcgtggagaaagccagccctgccaatgatctgtgttaccccggcaacttcaacgattacgaggagctgaaacacctgctgtccagaatcagccacttcgagaagatccagatcatccctaagagcagctggtctaatcacgatgccagctctggagtgtctagcgcctgtccttatctgggcaagagcagcttcttcagaaatgtggtgtggctgatcaagaagaacagcacctaccccacaatcaagcggagctacaacaacaccaaccaggaagatctgctggtgctgtggggaattcaccaccctaatgatgccgccgaacagacaaagctgtaccagaaccccaccacatatatctctgtgggcaccagcacactgaatcagagactggtgcctgagattgccacaagacctaaggtgaacggccagtctggcagaatcgagttcttctggaccatcctgaagccaaacgacgccatcaacttcgagagcaacggcaatttcatcgcccctgagtacgcctataagatcgtgaagaagggcgatagcaccatcatgaagagcgagctggagtacggcaactgtaataccaagtgccagacacctatgggcgccatcaatagctctatgcccttccacaatatccaccctctgacaatcggcgagtgtcctaagtacgtgaagagcaacagactggtgctggccaccggactgagaaatgcccctcagagagagacaagaggactgtttggagccatcgccggctttattgagggaggatggcagggaatggtggatggctggtatggctatcaccacagcaatgagcagggatctggatatgccgccgatcaggagtctacacagaaagccatcgacggcgtgacaaataaggtgaacagcatcatcaacaagatgaacacccagtttgaagctgtgggcagagagttcaacaacctggagcggagaatcgagaacctgaacaagaagatggaggacggctttctggatgtgtggacctataatgccgaactgctcgtgctgatggagaacgagagaaccctggatttccacgacagcaacgtgaagaacctgtacgacaaagtgagactgcagctgagagataatgccaaggaactgggcaatggctgcttcgagttctaccacaagtgtgacaacgagtgtatggagagcgtgaagaatggcacctacgactaccctcagtattctgaggaggccagactgaatagagaggagatcagcggcgtgaaactggaaagcatgggcacctaccagatcagaagcctggtgcctagaggatctcctggcagcggatatattcctgaggcccctagagatggacaggcctatgtgagaaaggatggcgaatgggtgctgctgtctacatttctgggacaccaccatcaccaccattgatgaacacgtgggatccgtaaaggagctccagcttttgttccctttagtgagggttaattgcgcgcttggcgtaatcatggtcatagctgtttcctgtgtgaaattgttatccgctcacaattccacacaacatacgagccggaagcataaagtgtaaagcctggggtgcctaatgagtgagctaactcacattaattgcgttgcgctcactgcccgctttccagtcgggaaacctgtcgtgccagctgcattaatgaatcggccaacgcgcggggagaggcggtttgcgtattgggcgctcttccgcttcctcgctcactgactcgctgcgctcggtcgttcggctgcggcgagcggtatcagctcactcaaaggcggtaatacggttatccacagaatcaggggataacgcaggaaagaacatgtgagcaaaaggccagcaaaaggccaggaaccgtaaaaaggccgcgttgctggcgtttttccataggctccgcccccctgacgagcatcacaaaaatcgacgctcaagtcagaggtggcgaaacccgacaggactataaagataccaggcgtttccccctggaagctccctcgtgcgctctcctgttccgaccctgccgcttaccggatacctgtccgcctttctcccttcgggaagcgtggcgctttctcatagctcacgctgtaggtatctcagttcggtgtaggtcgttcgctccaagctgggctgtgtgcacgaaccccccgttcagcccgaccgctgcgccttatccggtaactatcgtcttgagtccaacccggtaagacacgacttatcgccactggcagcagccactggtaacaggattagcagagcgaggtatgtaggcggtgctacagagttcttgaagtggtggcctaactacggctacactagaaggacagtatttggtatctgcgctctgctgaagccagttaccttcggaaaaagagttggtagctcttgatccggcaaacaaaccaccgctggtagcggtggtttttttgtttgcaagcagcagattacgcgcagaaaaaaaggatctcaagaagatcctttgatcttttctacggggtctgacgctcagtggaacgaaaactcacgttaagggattttggtcatgagattatcaaaaaggatcttcacctagatccttttaaattaaaaatgaagttttaaatcaatctaaagtatatatgagtaaacttggtctgacagttaccaatgcttaatcagtgaggcacctatctcagcgatctgtctatttcgttcatccatagttgcctgactccccgtcgtgtagataactacgatacgggagggcttaccatctggccccagtgctgcaatgataccgcgagacccacgctcaccggctccagatttatcagcaataaaccagccagccggaagggccgagcgcagaagtggtcctgcaactttatccgcctccatccagtctattaattgttgccgggaagctagagtaagtagttcgccagttaatagtttgcgcaacgttgttgccattgctacaggcatcgtggtgtcacgctcgtcgtttggtatggcttcattcagctccggttcccaacgatcaaggcgagttacatgatcccccatgttgtgcaaaaaagcggttagctccttcggtcctccgatcgttgtcagaagtaagttggccgcagtgttatcactcatggttatggcagcactgcataattctcttactgtcatgccatccgtaagatgcttttctgtgactggtgagtactcaaccaagtcattctgagaatagtgtatgcggcgaccgagttgctcttgcccggcgtcaatacgggataataccgcgccacatagcagaactttaaaagtgctcatcattggaaaacgttcttcggggcgaaaactctcaaggatcttaccgctgttgagatccagttcgatgtaacccactcgtgcacccaactgatcttcagcatcttttactttcaccagcgtttctgggtgagcaaaaacaggaaggcaaaatgccgcaaaaaagggaataagggcgacacggaaatgttgaatactcatactcttcctttttcaatattattgaagcatttatcagggttattgtctcatgagcggatacatatttgaatgtatttagaaaaataaacaaataggggttccgcgcacatttccccgaaaagtgccac

SEQ ID NO: 65 - DNA, 4603 bp, Artificial Sequence
  Plasmid DNA: 51497
ctaaattgtaagcgttaatattttgttaaaattcgcgttaaatttttgttaaatcagctcattttttaaccaataggccgaaatcggcaaaatcccttataaatcaaaagaatagaccgagatagggttgagtgttgttccagtttggaacaagagtccactattaaagaacgtggactccaacgtcaaagggcgaaaaaccgtctatcagggcgatggcccactacgtgaaccatcaccctaatcaagttttttggggtcgaggtgccgtaaagcactaaatcggaaccctaaagggagcccccgatttagagcttgacggggaaagccggcgaacgtggcgagaaaggaagggaagaaagcgaaaggagcgggcgctagggcgctggcaagtgtagcggtcacgctgcgcgtaaccaccacacccgccgcgcttaatgcgccgctacagggcgcgtcccattcgccattcaggctgcgcaactgttgggaagggcgatcggtgcgggcctcttcgctattacgccagctggcgaaagggggatgtgctgcaaggcgattaagttgggtaacgccagggttttcccagtcacgacgttgtaaaacgacggccagtgagcgcgcgtaatacgactcactatagggcgaattgggtaccaaatctagagatatcgccaccatggagaagattgtgctgctgctggccattgtgtctctggtgaagagcgaccagatctgtattggctaccacgccaacaattctacagagcaggtggacaccatcatggagaaaaacgtgacagtgacacacgcccaggatattctggagaaaacccacaatggcaagctgtgtgatctggatggagtgaagcctctgatcctgagagattgttctgtggccggatggctgctgggaaatcccatgtgtgacgagttcatcaatgtgcctgagtggagctatatcgtggagaaggccaaccctcctaatgatctgtgctaccccggcaacttcaatgattacgaggagctgaagcacctgctgtccagaatcaaccacttcgagaagatccagatcatccctaagtctagctggagcgatcacgaagcctcttctggagtgtctagcgcctgtccttatcagggcagaagcagcttcttcagaaacgtggtgtggctgatcaagaagaatagcgcctaccccacaatcaagcggagctacaacaacaccaaccaggaagatctgctggtgctgtggggaattcaccaccctaatgatgccgccgaacagacaagactgtaccagaaccccaccacatatatctctgtgggcaccagcacactgaatcagagactggtgcctaagatcgccacaagaagcaaagtgaacggccagtctggcagaatggagttcttctggaccatcctgaagccaaatgacgccatcagcttcgagagcaacggcaatttcatcgcccctgagtacgcctataagatcgtgaagaagggcgatagcgccatcatgaagagcgagctggagtacggcaactgtaataccaagtgccagacacctatgggcgccatcaatagctctatgcccttccacaatatccaccctctgacaatcggcgagtgtcctaagtacgtgaagagcagcagactggtgctggccacaggactgagaaatagccctcagagagagacaagaggactgtttggagccatcgccggctttattgagggaggatggcagggaatggtggatggctggtatggctatcaccacagcaatgagcagggatctggatatgccgccgataaggagtctacacagaaggccattgacggcgtgacaaacaaggtgaacagcatcatcgacaagatgaacacccagtttgaagctgtgggcagagagttcaacaacctggagcggagaatcgagaacctgaacaagaagatggaggacggctttctggatgtgtggacctataatgccgaactgctcgtgctgatggagaacgagagaaccctggatttccacgacagcaacgtgaagaacctgtacgacaaagtgagactgcagctgagagataatgccaaggaactgggcaatggctgcttcgagttctaccacagatgtgacaacgagtgtatcgagtctgtgagaaatggcacatacggctaccctcagtattctgaggaggccagactgaagagagaggagatctctggcgtgaagctggagagcatcggcacataccagatcctgagcatctatagcacagtggcctcttctctggccctggccattatggtggccggactgtctctgtggatgtgtagcaatggcagcctgcagtgcagaatctgtatctgatgaacacgtgggatccgtaaaggagctccagcttttgttccctttagtgagggttaattgcgcgcttggcgtaatcatggtcatagctgtttcctgtgtgaaattgttatccgctcacaattccacacaacatacgagccggaagcataaagtgtaaagcctggggtgcctaatgagtgagctaactcacattaattgcgttgcgctcactgcccgctttccagtcgggaaacctgtcgtgccagctgcattaatgaatcggccaacgcgcggggagaggcggtttgcgtattgggcgctcttccgcttcctcgctcactgactcgctgcgctcggtcgttcggctgcggcgagcggtatcagctcactcaaaggcggtaatacggttatccacagaatcaggggataacgcaggaaagaacatgtgagcaaaaggccagcaaaaggccaggaaccgtaaaaaggccgcgttgctggcgtttttccataggctccgcccccctgacgagcatcacaaaaatcgacgctcaagtcagaggtggcgaaacccgacaggactataaagataccaggcgtttccccctggaagctccctcgtgcgctctcctgttccgaccctgccgcttaccggatacctgtccgcctttctcccttcgggaagcgtggcgctttctcatagctcacgctgtaggtatctcagttcggtgtaggtcgttcgctccaagctgggctgtgtgcacgaaccccccgttcagcccgaccgctgcgccttatccggtaactatcgtcttgagtccaacccggtaagacacgacttatcgccactggcagcagccactggtaacaggattagcagagcgaggtatgtaggcggtgctacagagttcttgaagtggtggcctaactacggctacactagaaggacagtatttggtatctgcgctctgctgaagccagttaccttcggaaaaagagttggtagctcttgatccggcaaacaaaccaccgctggtagcggtggtttttttgtttgcaagcagcagattacgcgcagaaaaaaaggatctcaagaagatcctttgatcttttctacggggtctgacgctcagtggaacgaaaactcacgttaagggattttggtcatgagattatcaaaaaggatcttcacctagatccttttaaattaaaaatgaagttttaaatcaatctaaagtatatatgagtaaacttggtctgacagttaccaatgcttaatcagtgaggcacctatctcagcgatctgtctatttcgttcatccatagttgcctgactccccgtcgtgtagataactacgatacgggagggcttaccatctggccccagtgctgcaatgataccgcgagacccacgctcaccggctccagatttatcagcaataaaccagccagccggaagggccgagcgcagaagtggtcctgcaactttatccgcctccatccagtctattaattgttgccgggaagctagagtaagtagttcgccagttaatagtttgcgcaacgttgttgccattgctacaggcatcgtggtgtcacgctcgtcgtttggtatggcttcattcagctccggttcccaacgatcaaggcgagttacatgatcccccatgttgtgcaaaaaagcggttagctccttcggtcctccgatcgttgtcagaagtaagttggccgcagtgttatcactcatggttatggcagcactgcataattctcttactgtcatgccatccgtaagatgcttttctgtgactggtgagtactcaaccaagtcattctgagaatagtgtatgcggcgaccgagttgctcttgcccggcgtcaatacgggataataccgcgccacatagcagaactttaaaagtgctcatcattggaaaacgttcttcggggcgaaaactctcaaggatcttaccgctgttgagatccagttcgatgtaacccactcgtgcacccaactgatcttcagcatcttttactttcaccagcgtttctgggtgagcaaaaacaggaaggcaaaatgccgcaaaaaagggaataagggcgacacggaaatgttgaatactcatactcttcctttttcaatattattgaagcatttatcagggttattgtctcatgagcggatacatatttgaatgtatttagaaaaataaacaaataggggttccgcgcacatttccccgaaaagtgccac

SEQ ID NO: 66 - DNA, 4630 bp, Artificial Sequence
  Plasmid DNA: 51498
ctaaattgtaagcgttaatattttgttaaaattcgcgttaaatttttgttaaatcagctcattttttaaccaataggccgaaatcggcaaaatcccttataaatcaaaagaatagaccgagatagggttgagtgttgttccagtttggaacaagagtccactattaaagaacgtggactccaacgtcaaagggcgaaaaaccgtctatcagggcgatggcccactacgtgaaccatcaccctaatcaagttttttggggtcgaggtgccgtaaagcactaaatcggaaccctaaagggagcccccgatttagagcttgacggggaaagccggcgaacgtggcgagaaaggaagggaagaaagcgaaaggagcgggcgctagggcgctggcaagtgtagcggtcacgctgcgcgtaaccaccacacccgccgcgcttaatgcgccgctacagggcgcgtcccattcgccattcaggctgcgcaactgttgggaagggcgatcggtgcgggcctcttcgctattacgccagctggcgaaagggggatgtgctgcaaggcgattaagttgggtaacgccagggttttcccagtcacgacgttgtaaaacgacggccagtgagcgcgcgtaatacgactcactatagggcgaattgggtaccaaatctagagatatcgccaccatggagaagattgtgctgctgctggccattgtgtctctggtgaagagcgaccagatctgtattggctaccacgccaacaattctacagagcaggtggacaccatcatggagaaaaacgtgacagtgacacacgcccaggatattctggagaaaacccacaatggcaagctgtgtgatctggatggagtgaagcctctgatcctgagagattgttctgtggccggatggctgctgggaaatcccatgtgtgacgagttcatcaatgtgcctgagtggagctatatcgtggagaaggccaaccctcctaatgatctgtgctaccccggcaacttcaatgattacgaggagctgaagcacctgctgtccagaatcaaccacttcgagaagatccagatcatccctaagtctagctggagcgatcacgaagcctcttctggagtgtctagcgcctgtccttatcagggcagaagcagcttcttcagaaacgtggtgtggctgatcaagaagaatagcgcctaccccacaatcaagcggagctacaacaacaccaaccaggaagatctgctggtgctgtggggaattcaccaccctaatgatgccgccgaacagacaagactgtaccagaaccccaccacatatatctctgtgggcaccagcacactgaatcagagactggtgcctaagatcgccacaagaagcaaagtgaacggccagtctggcagaatggagttcttctggaccatcctgaagccaaatgacgccatcagcttcgagagcaacggcaatttcatcgcccctgagtacgcctataagatcgtgaagaagggcgatagcgccatcatgaagagcgagctggagtacggcaactgtaataccaagtgccagacacctatgggcgccatcaatagctctatgcccttccacaatatccaccctctgacaatcggcgagtgtcctaagtacgtgaagagcagcagactggtgctggccacaggactgagaaatagccctcagagagagacaagaggactgtttggagccatcgccggctttattgagggaggatggcagggaatggtggatggctggtatggctatcaccacagcaatgagcagggatctggatatgccgccgataaggagtctacacagaaggccattgacggcgtgacaaacaaggtgaacagcatcatcgacaagatgaacacccagtttgaagctgtgggcagagagttcaacaacctggagcggagaatcgagaacctgaacaagaagatggaggacggctttctggatgtgtggacctataatgccgaactgctcgtgctgatggagaacgagagaaccctggatttccacgacagcaacgtgaagaacctgtacgacaaagtgagactgcagctgagagataatgccaaggaactgggcaatggctgcttcgagttctaccacagatgtgacaacgagtgtatcgagtctgtgagaaatggcacatacggctaccctcagtattctgaggaggccagactgaagagagaggagatctctggcgtgaagctggagagcatcggcacataccagatcagaagcctggtgcctagaggatctcctggcagcggatatattcctgaggcccctagagatggacaggcctatgtgagaaaggatggcgaatgggtgctgctgtctacatttctgggacaccaccatcaccaccattgatgaacacgtgggatccgtaaaggagctccagcttttgttccctttagtgagggttaattgcgcgcttggcgtaatcatggtcatagctgtttcctgtgtgaaattgttatccgctcacaattccacacaacatacgagccggaagcataaagtgtaaagcctggggtgcctaatgagtgagctaactcacattaattgcgttgcgctcactgcccgctttccagtcgggaaacctgtcgtgccagctgcattaatgaatcggccaacgcgcggggagaggcggtttgcgtattgggcgctcttccgcttcctcgctcactgactcgctgcgctcggtcgttcggctgcggcgagcggtatcagctcactcaaaggcggtaatacggttatccacagaatcaggggataacgcaggaaagaacatgtgagcaaaaggccagcaaaaggccaggaaccgtaaaaaggccgcgttgctggcgtttttccataggctccgcccccctgacgagcatcacaaaaatcgacgctcaagtcagaggtggcgaaacccgacaggactataaagataccaggcgtttccccctggaagctccctcgtgcgctctcctgttccgaccctgccgcttaccggatacctgtccgcctttctcccttcgggaagcgtggcgctttctcatagctcacgctgtaggtatctcagttcggtgtaggtcgttcgctccaagctgggctgtgtgcacgaaccccccgttcagcccgaccgctgcgccttatccggtaactatcgtcttgagtccaacccggtaagacacgacttatcgccactggcagcagccactggtaacaggattagcagagcgaggtatgtaggcggtgctacagagttcttgaagtggtggcctaactacggctacactagaaggacagtatttggtatctgcgctctgctgaagccagttaccttcggaaaaagagttggtagctcttgatccggcaaacaaaccaccgctggtagcggtggtttttttgtttgcaagcagcagattacgcgcagaaaaaaaggatctcaagaagatcctttgatcttttctacggggtctgacgctcagtggaacgaaaactcacgttaagggattttggtcatgagattatcaaaaaggatcttcacctagatccttttaaattaaaaatgaagttttaaatcaatctaaagtatatatgagtaaacttggtctgacagttaccaatgcttaatcagtgaggcacctatctcagcgatctgtctatttcgttcatccatagttgcctgactccccgtcgtgtagataactacgatacgggagggcttaccatctggccccagtgctgcaatgataccgcgagacccacgctcaccggctccagatttatcagcaataaaccagccagccggaagggccgagcgcagaagtggtcctgcaactttatccgcctccatccagtctattaattgttgccgggaagctagagtaagtagttcgccagttaatagtttgcgcaacgttgttgccattgctacaggcatcgtggtgtcacgctcgtcgtttggtatggcttcattcagctccggttcccaacgatcaaggcgagttacatgatcccccatgttgtgcaaaaaagcggttagctccttcggtcctccgatcgttgtcagaagtaagttggccgcagtgttatcactcatggttatggcagcactgcataattctcttactgtcatgccatccgtaagatgcttttctgtgactggtgagtactcaaccaagtcattctgagaatagtgtatgcggcgaccgagttgctcttgcccggcgtcaatacgggataataccgcgccacatagcagaactttaaaagtgctcatcattggaaaacgttcttcggggcgaaaactctcaaggatcttaccgctgttgagatccagttcgatgtaacccactcgtgcacccaactgatcttcagcatcttttactttcaccagcgtttctgggtgagcaaaaacaggaaggcaaaatgccgcaaaaaagggaataagggcgacacggaaatgttgaatactcatactcttcctttttcaatattattgaagcatttatcagggttattgtctcatgagcggatacatatttgaatgtatttagaaaaataaacaaataggggttccgcgcacatttccccgaaaagtgccac

SEQ ID NO: 67 - DNA, 3025 bp, Artificial Sequence
  Plasmid DNA: 51499
ctaaattgtaagcgttaatattttgttaaaattcgcgttaaatttttgttaaatcagctcattttttaaccaataggccgaaatcggcaaaatcccttataaatcaaaagaatagaccgagatagggttgagtgttgttccagtttggaacaagagtccactattaaagaacgtggactccaacgtcaaagggcgaaaaaccgtctatcagggcgatggcccactacgtgaaccatcaccctaatcaagttttttggggtcgaggtgccgtaaagcactaaatcggaaccctaaagggagcccccgatttagagcttgacggggaaagccggcgaacgtggcgagaaaggaagggaagaaagcgaaaggagcgggcgctagggcgctggcaagtgtagcggtcacgctgcgcgtaaccaccacacccgccgcgcttaatgcgccgctacagggcgcgtcccattcgccattcaggctgcgcaactgttgggaagggcgatcggtgcgggcctcttcgctattacgccagctggcgaaagggggatgtgctgcaaggcgattaagttgggtaacgccagggttttcccagtcacgacgttgtaaaacgacggccagtgagcgcgcgtaatacgactcactatagggcgaattgggtaccagaagcctggtgcctagaggatctcctggcagcggatatattcctgaggcccctagagatggacaggcctatgtgagaaaggatggcgaatgggtgctgctgtctacatttctgggacaccaccatcaccaccattgatgaacacgtgggatccgtaaaggagctccagcttttgttccctttagtgagggttaattgcgcgcttggcgtaatcatggtcatagctgtttcctgtgtgaaattgttatccgctcacaattccacacaacatacgagccggaagcataaagtgtaaagcctggggtgcctaatgagtgagctaactcacattaattgcgttgcgctcactgcccgctttccagtcgggaaacctgtcgtgccagctgcattaatgaatcggccaacgcgcggggagaggcggtttgcgtattgggcgctcttccgcttcctcgctcactgactcgctgcgctcggtcgttcggctgcggcgagcggtatcagctcactcaaaggcggtaatacggttatccacagaatcaggggataacgcaggaaagaacatgtgagcaaaaggccagcaaaaggccaggaaccgtaaaaaggccgcgttgctggcgtttttccataggctccgcccccctgacgagcatcacaaaaatcgacgctcaagtcagaggtggcgaaacccgacaggactataaagataccaggcgtttccccctggaagctccctcgtgcgctctcctgttccgaccctgccgcttaccggatacctgtccgcctttctcccttcgggaagcgtggcgctttctcatagctcacgctgtaggtatctcagttcggtgtaggtcgttcgctccaagctgggctgtgtgcacgaaccccccgttcagcccgaccgctgcgccttatccggtaactatcgtcttgagtccaacccggtaagacacgacttatcgccactggcagcagccactggtaacaggattagcagagcgaggtatgtaggcggtgctacagagttcttgaagtggtggcctaactacggctacactagaaggacagtatttggtatctgcgctctgctgaagccagttaccttcggaaaaagagttggtagctcttgatccggcaaacaaaccaccgctggtagcggtggtttttttgtttgcaagcagcagattacgcgcagaaaaaaaggatctcaagaagatcctttgatcttttctacggggtctgacgctcagtggaacgaaaactcacgttaagggattttggtcatgagattatcaaaaaggatcttcacctagatccttttaaattaaaaatgaagttttaaatcaatctaaagtatatatgagtaaacttggtctgacagttaccaatgcttaatcagtgaggcacctatctcagcgatctgtctatttcgttcatccatagttgcctgactccccgtcgtgtagataactacgatacgggagggcttaccatctggccccagtgctgcaatgataccgcgagacccacgctcaccggctccagatttatcagcaataaaccagccagccggaagggccgagcgcagaagtggtcctgcaactttatccgcctccatccagtctattaattgttgccgggaagctagagtaagtagttcgccagttaatagtttgcgcaacgttgttgccattgctacaggcatcgtggtgtcacgctcgtcgtttggtatggcttcattcagctccggttcccaacgatcaaggcgagttacatgatcccccatgttgtgcaaaaaagcggttagctccttcggtcctccgatcgttgtcagaagtaagttggccgcagtgttatcactcatggttatggcagcactgcataattctcttactgtcatgccatccgtaagatgcttttctgtgactggtgagtactcaaccaagtcattctgagaatagtgtatgcggcgaccgagttgctcttgcccggcgtcaatacgggataataccgcgccacatagcagaactttaaaagtgctcatcattggaaaacgttcttcggggcgaaaactctcaaggatcttaccgctgttgagatccagttcgatgtaacccactcgtgcacccaactgatcttcagcatcttttactttcaccagcgtttctgggtgagcaaaaacaggaaggcaaaatgccgcaaaaaagggaataagggcgacacggaaatgttgaatactcatactcttcctttttcaatattattgaagcatttatcagggttattgtctcatgagcggatacatatttgaatgtatttagaaaaataaacaaataggggttccgcgcacatttccccgaaaagtgccac

SEQ ID NO: 68 - DNA, 4609 bp, Artificial Sequence
  Plasmid DNA: 51804
ctaaattgtaagcgttaatattttgttaaaattcgcgttaaatttttgttaaatcagctcattttttaaccaataggccgaaatcggcaaaatcccttataaatcaaaagaatagaccgagatagggttgagtgttgttccagtttggaacaagagtccactattaaagaacgtggactccaacgtcaaagggcgaaaaaccgtctatcagggcgatggcccactacgtgaaccatcaccctaatcaagttttttggggtcgaggtgccgtaaagcactaaatcggaaccctaaagggagcccccgatttagagcttgacggggaaagccggcgaacgtggcgagaaaggaagggaagaaagcgaaaggagcgggcgctagggcgctggcaagtgtagcggtcacgctgcgcgtaaccaccacacccgccgcgcttaatgcgccgctacagggcgcgtcccattcgccattcaggctgcgcaactgttgggaagggcgatcggtgcgggcctcttcgctattacgccagctggcgaaagggggatgtgctgcaaggcgattaagttgggtaacgccagggttttcccagtcacgacgttgtaaaacgacggccagtgagcgcgcgtaatacgactcactatagggcgaattgggtaccaaatctagagatatcgccaccatggaagccagactgctggtgctgctgtgtgcctttgccgccacaaatgcagatacaatctgtattggctaccacgccaacaatagcaccgataccgtggatacagtgctggagaagaatgtgaccgtgacccactctgtgaatctgctggaggatagccacaatggcaagctgtgtaagctgaaaggaattgcccctctgcagctgggcaaatgtaatattgccggctggctgctgggaaatcctgaatgtgatctgctgctgacagccagcagctggtcttatatcgtggagaccagcaatagcgagaatggcacctgttaccctggcgacttcatcgattacgaggagctgagagaacagctgtctagcgtgtccagcttcgagaagttcgagatcttccctaagacaagcagctggcctaatcacgagacaacaaagggagtgacagccgcctgttcttatgccggagccagctccttttacagaaacctgctgtggctgacaaagaagggcagcagctaccctaagctgtctaagagctacgtgaacaacaagggcaaagaagtgctggtgctgtggggagtgcaccaccctcctacaggaacagatcagcagagcctgtaccagaatgccgatgcctatgtgtctgtgggcagcagcaagtacaacagaagattcacccctgaaattgccgccagacccaaagtgagagatcaggccggcagaatgaattactactggaccctgctggaacctggcgataccatcacatttgaggccaccggaaatctgattgccccttggtatgcctttgccctgaatagaggctctggctctggcatcattacatctgatgcccctgtgcacgactgtaataccaagtgtcagacacctcacggcgccattaatagcagcctgcccttccagaatattcaccctgtgaccatcggcgagtgtcctaagtatgtgaggagcaccaaactgagaatggccaccggcctgagaaatatccctcagagagagaccagaggactgtttggagccatcgccggctttattgagggaggatggaccggaatgatcgatggctggtacggctatcaccaccagaatgagcagggatctggatatgccgccgatcagaagtctacacagaacgccatcgacggcatcacaaacaaggtgaacagcgtgatcgagaagatgaacacccagtttacagctgtgggcaaggagttcaacaacctggagcggagaatcgagaacctgaacaagaaagtggacgacggcttcctggatatttggacctacaatgccgagctgctcgtgctcctggagaatgagagaaccctggacttccacgacagcaatgtgagaaacctgtacgagaaggtgaagagccagctgaagaacaatgccaaggagatcggcaacggctgctttgagttctaccacaagtgtgacgatgcctgtatggagtctgtgagaaacggcacctacgactaccctaagtatagcgaggagagcaagctgaatagagaggagatcgacggcgtgaaactggaaagcatgggcgtgtatcagatcctggccatctattctacagtggcctcttctctggtgctcctggtgtctctgggagccatcagcttttggatgtgtagcaatggcagcctgcagtgcagaatctgtatctgatgaacacgtgggatccgtaaaggagctccagcttttgttccctttagtgagggttaattgcgcgcttggcgtaatcatggtcatagctgtttcctgtgtgaaattgttatccgctcacaattccacacaacatacgagccggaagcataaagtgtaaagcctggggtgcctaatgagtgagctaactcacattaattgcgttgcgctcactgcccgctttccagtcgggaaacctgtcgtgccagctgcattaatgaatcggccaacgcgcggggagaggcggtttgcgtattgggcgctcttccgcttcctcgctcactgactcgctgcgctcggtcgttcggctgcggcgagcggtatcagctcactcaaaggcggtaatacggttatccacagaatcaggggataacgcaggaaagaacatgtgagcaaaaggccagcaaaaggccaggaaccgtaaaaaggccgcgttgctggcgtttttccataggctccgcccccctgacgagcatcacaaaaatcgacgctcaagtcagaggtggcgaaacccgacaggactataaagataccaggcgtttccccctggaagctccctcgtgcgctctcctgttccgaccctgccgcttaccggatacctgtccgcctttctcccttcgggaagcgtggcgctttctcatagctcacgctgtaggtatctcagttcggtgtaggtcgttcgctccaagctgggctgtgtgcacgaaccccccgttcagcccgaccgctgcgccttatccggtaactatcgtcttgagtccaacccggtaagacacgacttatcgccactggcagcagccactggtaacaggattagcagagcgaggtatgtaggcggtgctacagagttcttgaagtggtggcctaactacggctacactagaaggacagtatttggtatctgcgctctgctgaagccagttaccttcggaaaaagagttggtagctcttgatccggcaaacaaaccaccgctggtagcggtggtttttttgtttgcaagcagcagattacgcgcagaaaaaaaggatctcaagaagatcctttgatcttttctacggggtctgacgctcagtggaacgaaaactcacgttaagggattttggtcatgagattatcaaaaaggatcttcacctagatccttttaaattaaaaatgaagttttaaatcaatctaaagtatatatgagtaaacttggtctgacagttaccaatgcttaatcagtgaggcacctatctcagcgatctgtctatttcgttcatccatagttgcctgactccccgtcgtgtagataactacgatacgggagggcttaccatctggccccagtgctgcaatgataccgcgagacccacgctcaccggctccagatttatcagcaataaaccagccagccggaagggccgagcgcagaagtggtcctgcaactttatccgcctccatccagtctattaattgttgccgggaagctagagtaagtagttcgccagttaatagtttgcgcaacgttgttgccattgctacaggcatcgtggtgtcacgctcgtcgtttggtatggcttcattcagctccggttcccaacgatcaaggcgagttacatgatcccccatgttgtgcaaaaaagcggttagctccttcggtcctccgatcgttgtcagaagtaagttggccgcagtgttatcactcatggttatggcagcactgcataattctcttactgtcatgccatccgtaagatgcttttctgtgactggtgagtactcaaccaagtcattctgagaatagtgtatgcggcgaccgagttgctcttgcccggcgtcaatacgggataataccgcgccacatagcagaactttaaaagtgctcatcattggaaaacgttcttcggggcgaaaactctcaaggatcttaccgctgttgagatccagttcgatgtaacccactcgtgcacccaactgatcttcagcatcttttactttcaccagcgtttctgggtgagcaaaaacaggaaggcaaaatgccgcaaaaaagggaataagggcgacacggaaatgttgaatactcatactcttcctttttcaatattattgaagcatttatcagggttattgtctcatgagcggatacatatttgaatgtatttagaaaaataaacaaataggggttccgcgcacatttccccgaaaagtgccac

SEQ ID NO: 69 - DNA, 4636 bp, Artificial Sequence
  Plasmid DNA: 51805
ctaaattgtaagcgttaatattttgttaaaattcgcgttaaatttttgttaaatcagctcattttttaaccaataggccgaaatcggcaaaatcccttataaatcaaaagaatagaccgagatagggttgagtgttgttccagtttggaacaagagtccactattaaagaacgtggactccaacgtcaaagggcgaaaaaccgtctatcagggcgatggcccactacgtgaaccatcaccctaatcaagttttttggggtcgaggtgccgtaaagcactaaatcggaaccctaaagggagcccccgatttagagcttgacggggaaagccggcgaacgtggcgagaaaggaagggaagaaagcgaaaggagcgggcgctagggcgctggcaagtgtagcggtcacgctgcgcgtaaccaccacacccgccgcgcttaatgcgccgctacagggcgcgtcccattcgccattcaggctgcgcaactgttgggaagggcgatcggtgcgggcctcttcgctattacgccagctggcgaaagggggatgtgctgcaaggcgattaagttgggtaacgccagggttttcccagtcacgacgttgtaaaacgacggccagtgagcgcgcgtaatacgactcactatagggcgaattgggtaccaaatctagagatatcgccaccatggaagccagactgctggtgctgctgtgtgcctttgccgccacaaatgcagatacaatctgtattggctaccacgccaacaatagcaccgataccgtggatacagtgctggagaagaatgtgaccgtgacccactctgtgaatctgctggaggatagccacaatggcaagctgtgtaagctgaaaggaattgcccctctgcagctgggcaaatgtaatattgccggctggctgctgggaaatcctgaatgtgatctgctgctgacagccagcagctggtcttatatcgtggagaccagcaatagcgagaatggcacctgttaccctggcgacttcatcgattacgaggagctgagagaacagctgtctagcgtgtccagcttcgagaagttcgagatcttccctaagacaagcagctggcctaatcacgagacaacaaagggagtgacagccgcctgttcttatgccggagccagctccttttacagaaacctgctgtggctgacaaagaagggcagcagctaccctaagctgtctaagagctacgtgaacaacaagggcaaagaagtgctggtgctgtggggagtgcaccaccctcctacaggaacagatcagcagagcctgtaccagaatgccgatgcctatgtgtctgtgggcagcagcaagtacaacagaagattcacccctgaaattgccgccagacccaaagtgagagatcaggccggcagaatgaattactactggaccctgctggaacctggcgataccatcacatttgaggccaccggaaatctgattgccccttggtatgcctttgccctgaatagaggctctggctctggcatcattacatctgatgcccctgtgcacgactgtaataccaagtgtcagacacctcacggcgccattaatagcagcctgcccttccagaatattcaccctgtgaccatcggcgagtgtcctaagtatgtgaggagcaccaaactgagaatggccaccggcctgagaaatatccctcagagagagaccagaggactgtttggagccatcgccggctttattgagggaggatggaccggaatgatcgatggctggtacggctatcaccaccagaatgagcagggatctggatatgccgccgatcagaagtctacacagaacgccatcgacggcatcacaaacaaggtgaacagcgtgatcgagaagatgaacacccagtttacagctgtgggcaaggagttcaacaacctggagcggagaatcgagaacctgaacaagaaagtggacgacggcttcctggatatttggacctacaatgccgagctgctcgtgctcctggagaatgagagaaccctggacttccacgacagcaatgtgagaaacctgtacgagaaggtgaagagccagctgaagaacaatgccaaggagatcggcaacggctgctttgagttctaccacaagtgtgacgatgcctgtatggagtctgtgagaaacggcacctacgactaccctaagtatagcgaggagagcaagctgaatagagaggagatcgacggcgtgaaactggaaagcatgggcgtgtatcagatcagaagcctggtgcctagaggatctcctggcagcggatatattcctgaggcccctagagatggacaggcctatgtgagaaaggatggcgaatgggtgctgctgtctacatttctgggacaccaccatcaccaccattgatgaacacgtgggatccgtaaaggagctccagcttttgttccctttagtgagggttaattgcgcgcttggcgtaatcatggtcatagctgtttcctgtgtgaaattgttatccgctcacaattccacacaacatacgagccggaagcataaagtgtaaagcctggggtgcctaatgagtgagctaactcacattaattgcgttgcgctcactgcccgctttccagtcgggaaacctgtcgtgccagctgcattaatgaatcggccaacgcgcggggagaggcggtttgcgtattgggcgctcttccgcttcctcgctcactgactcgctgcgctcggtcgttcggctgcggcgagcggtatcagctcactcaaaggcggtaatacggttatccacagaatcaggggataacgcaggaaagaacatgtgagcaaaaggccagcaaaaggccaggaaccgtaaaaaggccgcgttgctggcgtttttccataggctccgcccccctgacgagcatcacaaaaatcgacgctcaagtcagaggtggcgaaacccgacaggactataaagataccaggcgtttccccctggaagctccctcgtgcgctctcctgttccgaccctgccgcttaccggatacctgtccgcctttctcccttcgggaagcgtggcgctttctcatagctcacgctgtaggtatctcagttcggtgtaggtcgttcgctccaagctgggctgtgtgcacgaaccccccgttcagcccgaccgctgcgccttatccggtaactatcgtcttgagtccaacccggtaagacacgacttatcgccactggcagcagccactggtaacaggattagcagagcgaggtatgtaggcggtgctacagagttcttgaagtggtggcctaactacggctacactagaaggacagtatttggtatctgcgctctgctgaagccagttaccttcggaaaaagagttggtagctcttgatccggcaaacaaaccaccgctggtagcggtggtttttttgtttgcaagcagcagattacgcgcagaaaaaaaggatctcaagaagatcctttgatcttttctacggggtctgacgctcagtggaacgaaaactcacgttaagggattttggtcatgagattatcaaaaaggatcttcacctagatccttttaaattaaaaatgaagttttaaatcaatctaaagtatatatgagtaaacttggtctgacagttaccaatgcttaatcagtgaggcacctatctcagcgatctgtctatttcgttcatccatagttgcctgactccccgtcgtgtagataactacgatacgggagggcttaccatctggccccagtgctgcaatgataccgcgagacccacgctcaccggctccagatttatcagcaataaaccagccagccggaagggccgagcgcagaagtggtcctgcaactttatccgcctccatccagtctattaattgttgccgggaagctagagtaagtagttcgccagttaatagtttgcgcaacgttgttgccattgctacaggcatcgtggtgtcacgctcgtcgtttggtatggcttcattcagctccggttcccaacgatcaaggcgagttacatgatcccccatgttgtgcaaaaaagcggttagctccttcggtcctccgatcgttgtcagaagtaagttggccgcagtgttatcactcatggttatggcagcactgcataattctcttactgtcatgccatccgtaagatgcttttctgtgactggtgagtactcaaccaagtcattctgagaatagtgtatgcggcgaccgagttgctcttgcccggcgtcaatacgggataataccgcgccacatagcagaactttaaaagtgctcatcattggaaaacgttcttcggggcgaaaactctcaaggatcttaccgctgttgagatccagttcgatgtaacccactcgtgcacccaactgatcttcagcatcttttactttcaccagcgtttctgggtgagcaaaaacaggaaggcaaaatgccgcaaaaaagggaataagggcgacacggaaatgttgaatactcatactcttcctttttcaatattattgaagcatttatcagggttattgtctcatgagcggatacatatttgaatgtatttagaaaaataaacaaataggggttccgcgcacatttccccgaaaagtgccac

SEQ ID NO: 70 - DNA, 4609 bp, Artificial Sequence
  Plasmid DNA: 51803
ctaaattgtaagcgttaatattttgttaaaattcgcgttaaatttttgttaaatcagctcattttttaaccaataggccgaaatcggcaaaatcccttataaatcaaaagaatagaccgagatagggttgagtgttgttccagtttggaacaagagtccactattaaagaacgtggactccaacgtcaaagggcgaaaaaccgtctatcagggcgatggcccactacgtgaaccatcaccctaatcaagttttttggggtcgaggtgccgtaaagcactaaatcggaaccctaaagggagcccccgatttagagcttgacggggaaagccggcgaacgtggcgagaaaggaagggaagaaagcgaaaggagcgggcgctagggcgctggcaagtgtagcggtcacgctgcgcgtaaccaccacacccgccgcgcttaatgcgccgctacagggcgcgtcccattcgccattcaggctgcgcaactgttgggaagggcgatcggtgcgggcctcttcgctattacgccagctggcgaaagggggatgtgctgcaaggcgattaagttgggtaacgccagggttttcccagtcacgacgttgtaaaacgacggccagtgagcgcgcgtaatacgactcactatagggcgaattgggtaccaaatctagagatatcgccaccatggaagccagactgctggtgctgctgtgtgcctttgccgccacaaatgcagatacaatctgtattggctaccacgccaacaatagcaccgataccgtggatacagtgctggagaagaatgtgaccgtgacccactctgtgaatctgctggaggatagccacaatggcaagctgtgtaagctgaaaggaattgcccctctgcagctgggcaaatgtaatattgccggctggctgctgggaaatcctgaatgtgatctgctgctgacagccagcagctggtcttatatcgtggagaccagcaatagcgagaatggcacctgttaccctggcgacttcatcgattacgaggagctgagagaacagctgtctagcgtgtccagcttcgagaagttcgagatcttccctaagacaagcagctggcctaatcacgagacaacaaagggagtgacagccgcctgttcttatgccggagccagctccttttacagaaacctgctgtggctgacaaagaagggcagcagctaccctaagctgtctaagagctacgtgaacaacaagggcaaagaagtgctggtgctgtggggagtgcaccaccctcctacaggaacagatcagcagagcctgtaccagaatgccgatgcctatgtgtctgtgggcagcagcaagtacaacagaagattcacccctgaaattgccgccagacccaaagtgagagatcaggccggcagaatgaattactactggaccctgctggaacctggcgataccatcacatttgaggccaccggaaatctgattgccccttggtatgcctttgccctgaatagaggctctggctctggcatcattacatctgatgcccctgtgcacgactgtaataccaagtgtcagacacctcacggcgccattaatagcagcctgcccttccagaatattcaccctgtgaccatcggcgagtgtcctaagtatgtgaggagcaccaaactgagaatggccaccggcctgagaaatatccctagcatccagagcagaggactgtttggagccatcgccggctttattgagggaggatggaccggaatgatcgatggctggtacggctatcaccaccagaatgagcagggatctggatatgccgccgatcagaagtctacacagaacgccatcgacggcatcacaaacaaggtgaacagcgtgatcgagaagatgaacacccagtttacagctgtgggcaaggagttcaacaacctggagcggagaatcgagaacctgaacaagaaagtggacgacggcttcctggatatttggacctacaatgccgagctgctcgtgctcctggagaatgagagaaccctggacttccacgacagcaatgtgagaaacctgtacgagaaggtgaagagccagctgaagaacaatgccaaggagatcggcaacggctgctttgagttctaccacaagtgtgacgatgcctgtatggagtctgtgagaaacggcacctacgactaccctaagtatagcgaggagagcaagctgaatagagaggagatcgacggcgtgaaactggaaagcatgggcgtgtatcagatcctggccatctattctacagtggcctcttctctggtgctcctggtgtctctgggagccatcagcttttggatgtgtagcaatggcagcctgcagtgcagaatctgtatctgatgaacacgtgggatccgtaaaggagctccagcttttgttccctttagtgagggttaattgcgcgcttggcgtaatcatggtcatagctgtttcctgtgtgaaattgttatccgctcacaattccacacaacatacgagccggaagcataaagtgtaaagcctggggtgcctaatgagtgagctaactcacattaattgcgttgcgctcactgcccgctttccagtcgggaaacctgtcgtgccagctgcattaatgaatcggccaacgcgcggggagaggcggtttgcgtattgggcgctcttccgcttcctcgctcactgactcgctgcgctcggtcgttcggctgcggcgagcggtatcagctcactcaaaggcggtaatacggttatccacagaatcaggggataacgcaggaaagaacatgtgagcaaaaggccagcaaaaggccaggaaccgtaaaaaggccgcgttgctggcgtttttccataggctccgcccccctgacgagcatcacaaaaatcgacgctcaagtcagaggtggcgaaacccgacaggactataaagataccaggcgtttccccctggaagctccctcgtgcgctctcctgttccgaccctgccgcttaccggatacctgtccgcctttctcccttcgggaagcgtggcgctttctcatagctcacgctgtaggtatctcagttcggtgtaggtcgttcgctccaagctgggctgtgtgcacgaaccccccgttcagcccgaccgctgcgccttatccggtaactatcgtcttgagtccaacccggtaagacacgacttatcgccactggcagcagccactggtaacaggattagcagagcgaggtatgtaggcggtgctacagagttcttgaagtggtggcctaactacggctacactagaaggacagtatttggtatctgcgctctgctgaagccagttaccttcggaaaaagagttggtagctcttgatccggcaaacaaaccaccgctggtagcggtggtttttttgtttgcaagcagcagattacgcgcagaaaaaaaggatctcaagaagatcctttgatcttttctacggggtctgacgctcagtggaacgaaaactcacgttaagggattttggtcatgagattatcaaaaaggatcttcacctagatccttttaaattaaaaatgaagttttaaatcaatctaaagtatatatgagtaaacttggtctgacagttaccaatgcttaatcagtgaggcacctatctcagcgatctgtctatttcgttcatccatagttgcctgactccccgtcgtgtagataactacgatacgggagggcttaccatctggccccagtgctgcaatgataccgcgagacccacgctcaccggctccagatttatcagcaataaaccagccagccggaagggccgagcgcagaagtggtcctgcaactttatccgcctccatccagtctattaattgttgccgggaagctagagtaagtagttcgccagttaatagtttgcgcaacgttgttgccattgctacaggcatcgtggtgtcacgctcgtcgtttggtatggcttcattcagctccggttcccaacgatcaaggcgagttacatgatcccccatgttgtgcaaaaaagcggttagctccttcggtcctccgatcgttgtcagaagtaagttggccgcagtgttatcactcatggttatggcagcactgcataattctcttactgtcatgccatccgtaagatgcttttctgtgactggtgagtactcaaccaagtcattctgagaatagtgtatgcggcgaccgagttgctcttgcccggcgtcaatacgggataataccgcgccacatagcagaactttaaaagtgctcatcattggaaaacgttcttcggggcgaaaactctcaaggatcttaccgctgttgagatccagttcgatgtaacccactcgtgcacccaactgatcttcagcatcttttactttcaccagcgtttctgggtgagcaaaaacaggaaggcaaaatgccgcaaaaaagggaataagggcgacacggaaatgttgaatactcatactcttcctttttcaatattattgaagcatttatcagggttattgtctcatgagcggatacatatttgaatgtatttagaaaaataaacaaataggggttccgcgcacatttccccgaaaagtgccac

SEQ ID NO: 71 - DNA, 6128 bp, Artificial Sequence
  Plasmid DNA: 53335 (CMV/R)
tcgcgcgtttcggtgatgacggtgaaaacctctgacacatgcagctcccggagacggtcacagcttgtctgtaagcggatgccgggagcagacaagcccgtcagggcgcgtcagcgggtgttggcgggtgtcggggctggcttaactatgcggcatcagagcagattgtactgagagtgcaccatatgcggtgtgaaataccgcacagatgcgtaaggagaaaataccgcatcagattggctattggccattgcatacgttgtatccatatcataatatgtacatttatattggctcatgtccaacattaccgccatgttgacattgattattgactagttattaatagtaatcaattacggggtcattagttcatagcccatatatggagttccgcgttacataacttacggtaaatggcccgcctggctgaccgcccaacgacccccgcccattgacgtcaataatgacgtatgttcccatagtaacgccaatagggactttccattgacgtcaatgggtggagtatttacggtaaactgcccacttggcagtacatcaagtgtatcatatgccaagtacgccccctattgacgtcaatgacggtaaatggcccgcctggcattatgcccagtacatgaccttatgggactttcctacttggcagtacatctacgtattagtcatcgctattaccatggtgatgcggttttggcagtacatcaatgggcgtggatagcggtttgactcacggggatttccaagtctccaccccattgacgtcaatgggagtttgttttggcaccaaaatcaacgggactttccaaaatgtcgtaacaactccgccccattgacgcaaatgggcggtaggcgtgtacggtgggaggtctatataagcagagctcgtttagtgaaccgtcagatcgcctggagacgccatccacgctgttttgacctccatagaagacaccgggaccgatccagcctccatcggctcgcatctctccttcacgcgcccgccgccctacctgaggccgccatccacgccggttgagtcgcgttctgccgcctcccgcctgtggtgcctcctgaactgcgtccgccgtctaggtaagtttaaagctcaggtcgagaccgggcctttgtccggcgctcccttggagcctacctagactcagccggctctccacgctttgcctgaccctgcttgctcaactctagttaacggtggagggcagtgtagtctgagcagtactcgttgctgccgcgcgcgccaccagacataatagctgacagactaacagactgttcctttccatgggtcttttctgcagtcaccgtcgtcgacacgtgtgatcagatatcgcggccgctctagagatatcgccaccatgaaaaccatcatcgccctgagctacatcctgtgcctggtgttcagccagaagctgcccggcaacgataatagcaccgccacactgtgtctgggacaccacgccgtgcctaatggcaccatcgtgaaaacaatcaccaacgaccagatcgaggtgaccaatgccacagagctggtgcagtctagcagcacaggcggcatctgtgatagccctcaccagatcctggatggcgagaactgtaccctgatcgatgccctgctgggagatcctcagtgtgacggcttccagaacaaaaagtgggacctgttcgtggagagaagcaaggcctacagcaactgctacccctacgacgtgcctgattacgccagcctgagatctctggtggcctcttctggcaccctggagttcaacaacgagagcttcaactgggccggagtgacacagaatggcaccagcagcgcctgtaagcggagaagcaacaagagcttcttcagcaggctgaactggctgacccacctgaagtacaagtaccccgccctgaatgtgaccatgcccaacaatgagaagttcgacaagctgtacatctggggagtgcaccaccctgtgaccgatagcgatcagatcagcctgtatgcccaggccagcggaagaatcacagtgagcaccaagagaagccagcagaccgtgatccccaacatcggctacagacccagagtgagggacatcagcagccggatcagcatctactggacaatcgtgaagcctggcgacatcctgctgatcaacagcaccggcaatctgattgcccccaggggctacttcaagatcaggagcggcaagagcagcatcatgagaagcgatgcccctatcggcaagtgtaacagcgagtgtatcacccccaatggcagcatccccaacgacaagcccttccagaacgtgaaccggatcacctatggcgcctgccctagatacgtgaagcagaacaccctgaagctggccaccggcatgagaaatgtgcccgagaagcagaccagaggcatctttggagccatcgccggattcatcgagaatggctgggagggaatggtggatggctggtacggcttcagacaccagaatagcgagggaacaggacaggccgccgatctgaaatctacacaggccgccatcaaccagatcaacggcaagctgaacaggctgatcggcaagaccaacgagaagttccaccagatcgaaaaggaattcagcgaggtggagggcagaatccaggacctggagaagtacgtggaggacaccaagatcgacctgtggagctacaatgccgaactgctggtggccctggagaatcagcacaccatcgacctgaccgacagcgagatgaacaagctgttcgagcggaccaagaagcagctgcgcgagaacgccgaggatatgggcaatggctgctttaagatctaccacaagtgtgacaacgcctgtatcgagagcatccggaacggcacctacgatcacgacgtgtacagagatgaggccctgaacaaccggtttcagatcaagggcgtggagctgaagagcggctacaaggactggattctgtggatcagcttcgccatcagctgctttctgctgtgtgtggccctgctgggctttattatgtgggcctgccagaagggcaacatccgctgtaacatctgtatctgatgaacacgtgggatccagatctgctgtgccttctagttgccagccatctgttgtttgcccctcccccgtgccttccttgaccctggaaggtgccactcccactgtcctttcctaataaaatgaggaaattgcatcgcattgtctgagtaggtgtcattctattctggggggtggggtggggcaggacagcaagggggaggattgggaagacaatagcaggcatgctggggatgcggtgggctctatgggtacccaggtgctgaagaattgacccggttcctcctgggccagaaagaagcaggcacatccccttctctgtgacacaccctgtccacgcccctggttcttagttccagccccactcataggacactcatagctcaggagggctccgccttcaatcccacccgctaaagtacttggagcggtctctccctccctcatcagcccaccaaaccaaacctagcctccaagagtgggaagaaattaaagcaagataggctattaagtgcagagggagagaaaatgcctccaacatgtgaggaagtaatgagagaaatcatagaattttaaggccatgatttaaggccatcatggccttaatcttccgcttcctcgctcactgactcgctgcgctcggtcgttcggctgcggcgagcggtatcagctcactcaaaggcggtaatacggttatccacagaatcaggggataacgcaggaaagaacatgtgagcaaaaggccagcaaaaggccaggaaccgtaaaaaggccgcgttgctggcgtttttccataggctccgcccccctgacgagcatcacaaaaatcgacgctcaagtcagaggtggcgaaacccgacaggactataaagataccaggcgtttccccctggaagctccctcgtgcgctctcctgttccgaccctgccgcttaccggatacctgtccgcctttctcccttcgggaagcgtggcgctttctcatagctcacgctgtaggtatctcagttcggtgtaggtcgttcgctccaagctgggctgtgtgcacgaaccccccgttcagcccgaccgctgcgccttatccggtaactatcgtcttgagtccaacccggtaagacacgacttatcgccactggcagcagccactggtaacaggattagcagagcgaggtatgtaggcggtgctacagagttcttgaagtggtggcctaactacggctacactagaagaacagtatttggtatctgcgctctgctgaagccagttaccttcggaaaaagagttggtagctcttgatccggcaaacaaaccaccgctggtagcggtggtttttttgtttgcaagcagcagattacgcgcagaaaaaaaggatctcaagaagatcctttgatcttttctacggggtctgacgctcagtggaacgaaaactcacgttaagggattttggtcatgagattatcaaaaaggatcttcacctagatccttttaaattaaaaatgaagttttaaatcaatctaaagtatatatgagtaaacttggtctgacagttaccaatgcttaatcagtgaggcacctatctcagcgatctgtctatttcgttcatccatagttgcctgactcggggggggggggcgctgaggtctgcctcgtgaagaaggtgttgctgactcataccaggcctgaatcgccccatcatccagccagaaagtgagggagccacggttgatgagagctttgttgtaggtggaccagttggtgattttgaacttttgctttgccacggaacggtctgcgttgtcgggaagatgcgtgatctgatccttcaactcagcaaaagttcgatttattcaacaaagccgccgtcccgtcaagtcagcgtaatgctctgccagtgttacaaccaattaaccaattctgattagaaaaactcatcgagcatcaaatgaaactgcaatttattcatatcaggattatcaataccatatttttgaaaaagccgtttctgtaatgaaggagaaaactcaccgaggcagttccataggatggcaagatcctggtatcggtctgcgattccgactcgtccaacatcaatacaacctattaatttcccctcgtcaaaaataaggttatcaagtgagaaatcaccatgagtgacgactgaatccggtgagaatggcaaaagcttatgcatttctttccagacttgttcaacaggccagccattacgctcgtcatcaaaatcactcgcatcaaccaaaccgttattcattcgtgattgcgcctgagcgagacgaaatacgcgatcgctgttaaaaggacaattacaaacaggaatcgaatgcaaccggcgcaggaacactgccagcgcatcaacaatattttcacctgaatcaggatattcttctaatacctggaatgctgttttcccggggatcgcagtggtgagtaaccatgcatcatcaggagtacggataaaatgcttgatggtcggaagaggcataaattccgtcagccagtttagtctgaccatctcatctgtaacatcattggcaacgctacctttgccatgtttcagaaacaactctggcgcatcgggcttcccatacaatcgatagattgtcgcacctgattgcccgacattatcgcgagcccatttatacccatataaatcagcatccatgttggaatttaatcgcggcctcgagcaagacgtttcccgttgaatatggctcataacaccccttgtattactgtttatgtaagcagacagttttattgttcatgatgatatatttttatcttgtgcaatgtaacatcagagattttgagacacaacgtggctttccccccccccccattattgaagcatttatcagggttattgtctcatgagcggatacatatttgaatgtatttagaaaaataaacaaataggggttccgcgcacatttccccgaaaagtgccacctgacgtctaagaaaccattattatcatgacattaacctataaaaataggcgtatcacgaggccctttcgtc

SEQ ID NO: 72 - DNA, 6128 bp, Artificial Sequence
  Plasmid DNA: 53336 (CMV/R)
tcgcgcgtttcggtgatgacggtgaaaacctctgacacatgcagctcccggagacggtcacagcttgtctgtaagcggatgccgggagcagacaagcccgtcagggcgcgtcagcgggtgttggcgggtgtcggggctggcttaactatgcggcatcagagcagattgtactgagagtgcaccatatgcggtgtgaaataccgcacagatgcgtaaggagaaaataccgcatcagattggctattggccattgcatacgttgtatccatatcataatatgtacatttatattggctcatgtccaacattaccgccatgttgacattgattattgactagttattaatagtaatcaattacggggtcattagttcatagcccatatatggagttccgcgttacataacttacggtaaatggcccgcctggctgaccgcccaacgacccccgcccattgacgtcaataatgacgtatgttcccatagtaacgccaatagggactttccattgacgtcaatgggtggagtatttacggtaaactgcccacttggcagtacatcaagtgtatcatatgccaagtacgccccctattgacgtcaatgacggtaaatggcccgcctggcattatgcccagtacatgaccttatgggactttcctacttggcagtacatctacgtattagtcatcgctattaccatggtgatgcggttttggcagtacatcaatgggcgtggatagcggtttgactcacggggatttccaagtctccaccccattgacgtcaatgggagtttgttttggcaccaaaatcaacgggactttccaaaatgtcgtaacaactccgccccattgacgcaaatgggcggtaggcgtgtacggtgggaggtctatataagcagagctcgtttagtgaaccgtcagatcgcctggagacgccatccacgctgttttgacctccatagaagacaccgggaccgatccagcctccatcggctcgcatctctccttcacgcgcccgccgccctacctgaggccgccatccacgccggttgagtcgcgttctgccgcctcccgcctgtggtgcctcctgaactgcgtccgccgtctaggtaagtttaaagctcaggtcgagaccgggcctttgtccggcgctcccttggagcctacctagactcagccggctctccacgctttgcctgaccctgcttgctcaactctagttaacggtggagggcagtgtagtctgagcagtactcgttgctgccgcgcgcgccaccagacataatagctgacagactaacagactgttcctttccatgggtcttttctgcagtcaccgtcgtcgacacgtgtgatcagatatcgcggccgctctagagatatcgccaccatgaaaaccatcatcgccctgagctacatcctgtgcctggtgttcagccagaagctgcccggcaacgataatagcaccgccacactgtgtctgggacaccacgccgtgcctaatggcaccatcgtgaaaacaatcaccaacgaccagatcgaggtgaccaatgccacagagctggtgcagtctagcagcacaggcggcatctgtgatagccctcaccagatcctggatggcgagaactgtaccctgatcgatgccctgctgggagatcctcagtgtgacggcttccagaacaaaaagtgggacctgttcgtggagagaagcaaggcctacagcaactgctacccctacgacgtgcctgattacgccagcctgagatctctggtggcctcttctggcaccctggagttcaacaacgagagcttcaactgggccggagtgacacagaatggcaccagcagcgcctgtaagcggagaagcaacaagagcttcttcagcaggctgaactggctgacccacctgaagtacaagtaccccgccctgaatgtgaccatgcccaacaatgagaagttcgacaagctgtacatctggggagtgcaccaccctgtgaccgatagcgatcagatcagcctgtatgcccaggccagcggaagaatcacagtgagcaccaagagaagccagcagaccgtgatccccaacatcggctacagacccagagtgagggacatcagcagccggatcagcatctactggacaatcgtgaagcctggcgacatcctgctgatcaacagcaccggcaatctgattgcccccaggggctacttcaagatcaggagcggcaagagcagcatcatgagaagcgatgcccctatcggcaagtgtaacagcgagtgtatcacccccaatggcagcatccccaacgacaagcccttccagaacgtgaaccggatcacctatggcgcctgccctagatacgtgaagcagaacaccctgaagctggccaccggcatgagaaatgtgccccagagagagaccagaggcatctttggagccatcgccggattcatcgagaatggctgggagggaatggtggatggctggtacggcttcagacaccagaatagcgagggaacaggacaggccgccgatctgaaatctacacaggccgccatcaaccagatcaacggcaagctgaacaggctgatcggcaagaccaacgagaagttccaccagatcgaaaaggaattcagcgaggtggagggcagaatccaggacctggagaagtacgtggaggacaccaagatcgacctgtggagctacaatgccgaactgctggtggccctggagaatcagcacaccatcgacctgaccgacagcgagatgaacaagctgttcgagcggaccaagaagcagctgcgcgagaacgccgaggatatgggcaatggctgctttaagatctaccacaagtgtgacaacgcctgtatcgagagcatccggaacggcacctacgatcacgacgtgtacagagatgaggccctgaacaaccggtttcagatcaagggcgtggagctgaagagcggctacaaggactggattctgtggatcagcttcgccatcagctgctttctgctgtgtgtggccctgctgggctttattatgtgggcctgccagaagggcaacatccgctgtaacatctgtatctgatgaacacgtgggatccagatctgctgtgccttctagttgccagccatctgttgtttgcccctcccccgtgccttccttgaccctggaaggtgccactcccactgtcctttcctaataaaatgaggaaattgcatcgcattgtctgagtaggtgtcattctattctggggggtggggtggggcaggacagcaagggggaggattgggaagacaatagcaggcatgctggggatgcggtgggctctatgggtacccaggtgctgaagaattgacccggttcctcctgggccagaaagaagcaggcacatccccttctctgtgacacaccctgtccacgcccctggttcttagttccagccccactcataggacactcatagctcaggagggctccgccttcaatcccacccgctaaagtacttggagcggtctctccctccctcatcagcccaccaaaccaaacctagcctccaagagtgggaagaaattaaagcaagataggctattaagtgcagagggagagaaaatgcctccaacatgtgaggaagtaatgagagaaatcatagaattttaaggccatgatttaaggccatcatggccttaatcttccgcttcctcgctcactgactcgctgcgctcggtcgttcggctgcggcgagcggtatcagctcactcaaaggcggtaatacggttatccacagaatcaggggataacgcaggaaagaacatgtgagcaaaaggccagcaaaaggccaggaaccgtaaaaaggccgcgttgctggcgtttttccataggctccgcccccctgacgagcatcacaaaaatcgacgctcaagtcagaggtggcgaaacccgacaggactataaagataccaggcgtttccccctggaagctccctcgtgcgctctcctgttccgaccctgccgcttaccggatacctgtccgcctttctcccttcgggaagcgtggcgctttctcatagctcacgctgtaggtatctcagttcggtgtaggtcgttcgctccaagctgggctgtgtgcacgaaccccccgttcagcccgaccgctgcgccttatccggtaactatcgtcttgagtccaacccggtaagacacgacttatcgccactggcagcagccactggtaacaggattagcagagcgaggtatgtaggcggtgctacagagttcttgaagtggtggcctaactacggctacactagaagaacagtatttggtatctgcgctctgctgaagccagttaccttcggaaaaagagttggtagctcttgatccggcaaacaaaccaccgctggtagcggtggtttttttgtttgcaagcagcagattacgcgcagaaaaaaaggatctcaagaagatcctttgatcttttctacggggtctgacgctcagtggaacgaaaactcacgttaagggattttggtcatgagattatcaaaaaggatcttcacctagatccttttaaattaaaaatgaagttttaaatcaatctaaagtatatatgagtaaacttggtctgacagttaccaatgcttaatcagtgaggcacctatctcagcgatctgtctatttcgttcatccatagttgcctgactcggggggggggggcgctgaggtctgcctcgtgaagaaggtgttgctgactcataccaggcctgaatcgccccatcatccagccagaaagtgagggagccacggttgatgagagctttgttgtaggtggaccagttggtgattttgaacttttgctttgccacggaacggtctgcgttgtcgggaagatgcgtgatctgatccttcaactcagcaaaagttcgatttattcaacaaagccgccgtcccgtcaagtcagcgtaatgctctgccagtgttacaaccaattaaccaattctgattagaaaaactcatcgagcatcaaatgaaactgcaatttattcatatcaggattatcaataccatatttttgaaaaagccgtttctgtaatgaaggagaaaactcaccgaggcagttccataggatggcaagatcctggtatcggtctgcgattccgactcgtccaacatcaatacaacctattaatttcccctcgtcaaaaataaggttatcaagtgagaaatcaccatgagtgacgactgaatccggtgagaatggcaaaagcttatgcatttctttccagacttgttcaacaggccagccattacgctcgtcatcaaaatcactcgcatcaaccaaaccgttattcattcgtgattgcgcctgagcgagacgaaatacgcgatcgctgttaaaaggacaattacaaacaggaatcgaatgcaaccggcgcaggaacactgccagcgcatcaacaatattttcacctgaatcaggatattcttctaatacctggaatgctgttttcccggggatcgcagtggtgagtaaccatgcatcatcaggagtacggataaaatgcttgatggtcggaagaggcataaattccgtcagccagtttagtctgaccatctcatctgtaacatcattggcaacgctacctttgccatgtttcagaaacaactctggcgcatcgggcttcccatacaatcgatagattgtcgcacctgattgcccgacattatcgcgagcccatttatacccatataaatcagcatccatgttggaatttaatcgcggcctcgagcaagacgtttcccgttgaatatggctcataacaccccttgtattactgtttatgtaagcagacagttttattgttcatgatgatatatttttatcttgtgcaatgtaacatcagagattttgagacacaacgtggctttccccccccccccattattgaagcatttatcagggttattgtctcatgagcggatacatatttgaatgtatttagaaaaataaacaaataggggttccgcgcacatttccccgaaaagtgccacctgacgtctaagaaaccattattatcatgacattaacctataaaaataggcgtatcacgaggccctttcgtc

SEQ ID NO: 73 - DNA, 6122 bp, Artificial Sequence
  Plasmid DNA: 53337 (CMV/R)
tcgcgcgtttcggtgatgacggtgaaaacctctgacacatgcagctcccggagacggtcacagcttgtctgtaagcggatgccgggagcagacaagcccgtcagggcgcgtcagcgggtgttggcgggtgtcggggctggcttaactatgcggcatcagagcagattgtactgagagtgcaccatatgcggtgtgaaataccgcacagatgcgtaaggagaaaataccgcatcagattggctattggccattgcatacgttgtatccatatcataatatgtacatttatattggctcatgtccaacattaccgccatgttgacattgattattgactagttattaatagtaatcaattacggggtcattagttcatagcccatatatggagttccgcgttacataacttacggtaaatggcccgcctggctgaccgcccaacgacccccgcccattgacgtcaataatgacgtatgttcccatagtaacgccaatagggactttccattgacgtcaatgggtggagtatttacggtaaactgcccacttggcagtacatcaagtgtatcatatgccaagtacgccccctattgacgtcaatgacggtaaatggcccgcctggcattatgcccagtacatgaccttatgggactttcctacttggcagtacatctacgtattagtcatcgctattaccatggtgatgcggttttggcagtacatcaatgggcgtggatagcggtttgactcacggggatttccaagtctccaccccattgacgtcaatgggagtttgttttggcaccaaaatcaacgggactttccaaaatgtcgtaacaactccgccccattgacgcaaatgggcggtaggcgtgtacggtgggaggtctatataagcagagctcgtttagtgaaccgtcagatcgcctggagacgccatccacgctgttttgacctccatagaagacaccgggaccgatccagcctccatcggctcgcatctctccttcacgcgcccgccgccctacctgaggccgccatccacgccggttgagtcgcgttctgccgcctcccgcctgtggtgcctcctgaactgcgtccgccgtctaggtaagtttaaagctcaggtcgagaccgggcctttgtccggcgctcccttggagcctacctagactcagccggctctccacgctttgcctgaccctgcttgctcaactctagttaacggtggagggcagtgtagtctgagcagtactcgttgctgccgcgcgcgccaccagacataatagctgacagactaacagactgttcctttccatgggtcttttctgcagtcaccgtcgtcgacacgtgtgatcagatatcgcggccgctctagagatatcgccaccatgaaaaccatcatcgccctgagctacatcctgtgcctggtgttcagccagaagctgcccggcaacgataatagcaccgccacactgtgtctgggacaccacgccgtgcctaatggcaccatcgtgaaaacaatcaccaacgaccagatcgaggtgaccaatgccacagagctggtgcagtctagcagcacaggcggcatctgtgatagccctcaccagatcctggatggcgagaactgtaccctgatcgatgccctgctgggagatcctcagtgtgacggcttccagaacaaaaagtgggacctgttcgtggagagaagcaaggcctacagcaactgctacccctacgacgtgcctgattacgccagcctgagatctctggtggcctcttctggcaccctggagttcaacaacgagagcttcaactgggccggagtgacacagaatggcaccagcagcgcctgtaagcggagaagcaacaagagcttcttcagcaggctgaactggctgacccacctgaagtacaagtaccccgccctgaatgtgaccatgcccaacaatgagaagttcgacaagctgtacatctggggagtgcaccaccctgtgaccgatagcgatcagatcagcctgtatgcccaggccagcggaagaatcacagtgagcaccaagagaagccagcagaccgtgatccccaacatcggctacagacccagagtgagggacatcagcagccggatcagcatctactggacaatcgtgaagcctggcgacatcctgctgatcaacagcaccggcaatctgattgcccccaggggctacttcaagatcaggagcggcaagagcagcatcatgagaagcgatgcccctatcggcaagtgtaacagcgagtgtatcacccccaatggcagcatccccaacgacaagcccttccagaacgtgaaccggatcacctatggcgcctgccctagatacgtgaagcagaacaccctgaagctggccaccggcatgagaaatgtgccccagagagagaccagaggcatctttggagccatcgccggattcatcgagaatggctgggagggaatggtggatggctggtacggcttcagacaccagaatagcgagggaacaggacaggccgccgatctgaaatctacacaggccgccatcaaccagatcaacggcaagctgaacaggctgatcggcaagaccaacgagaagttccaccagatcgaaaaggaattcagcgaggtggagggcagaatccaggacctggagaagtacgtggaggacaccaagatcgacctgtggagctacaatgccgaactgctggtggccctggagaatcagcacaccatcgacctgaccgacagcgagatgaacaagctgttcgagcggaccaagaagcagctgcgcgagaacgccgaggatatgggcaatggctgctttaagatctaccacaagtgtgacaacgcctgtatcgagagcatccggaacggcacctacgatcacgacgtgtacagagatgaggccctgaacaaccggtttcagatcagcggcagactggtgcctagaggatctcctggcagcggatatattcctgaggcccctagagatggacaggcctatgtgagaaaggatggcgaatgggtgctgctgtctacatttctgggacaccaccatcaccaccattgatgaacacgtgggatccagatctgctgtgccttctagttgccagccatctgttgtttgcccctcccccgtgccttccttgaccctggaaggtgccactcccactgtcctttcctaataaaatgaggaaattgcatcgcattgtctgagtaggtgtcattctattctggggggtggggtggggcaggacagcaagggggaggattgggaagacaatagcaggcatgctggggatgcggtgggctctatgggtacccaggtgctgaagaattgacccggttcctcctgggccagaaagaagcaggcacatccccttctctgtgacacaccctgtccacgcccctggttcttagttccagccccactcataggacactcatagctcaggagggctccgccttcaatcccacccgctaaagtacttggagcggtctctccctccctcatcagcccaccaaaccaaacctagcctccaagagtgggaagaaattaaagcaagataggctattaagtgcagagggagagaaaatgcctccaacatgtgaggaagtaatgagagaaatcatagaattttaaggccatgatttaaggccatcatggccttaatcttccgcttcctcgctcactgactcgctgcgctcggtcgttcggctgcggcgagcggtatcagctcactcaaaggcggtaatacggttatccacagaatcaggggataacgcaggaaagaacatgtgagcaaaaggccagcaaaaggccaggaaccgtaaaaaggccgcgttgctggcgtttttccataggctccgcccccctgacgagcatcacaaaaatcgacgctcaagtcagaggtggcgaaacccgacaggactataaagataccaggcgtttccccctggaagctccctcgtgcgctctcctgttccgaccctgccgcttaccggatacctgtccgcctttctcccttcgggaagcgtggcgctttctcatagctcacgctgtaggtatctcagttcggtgtaggtcgttcgctccaagctgggctgtgtgcacgaaccccccgttcagcccgaccgctgcgccttatccggtaactatcgtcttgagtccaacccggtaagacacgacttatcgccactggcagcagccactggtaacaggattagcagagcgaggtatgtaggcggtgctacagagttcttgaagtggtggcctaactacggctacactagaagaacagtatttggtatctgcgctctgctgaagccagttaccttcggaaaaagagttggtagctcttgatccggcaaacaaaccaccgctggtagcggtggtttttttgtttgcaagcagcagattacgcgcagaaaaaaaggatctcaagaagatcctttgatcttttctacggggtctgacgctcagtggaacgaaaactcacgttaagggattttggtcatgagattatcaaaaaggatcttcacctagatccttttaaattaaaaatgaagttttaaatcaatctaaagtatatatgagtaaacttggtctgacagttaccaatgcttaatcagtgaggcacctatctcagcgatctgtctatttcgttcatccatagttgcctgactcggggggggggggcgctgaggtctgcctcgtgaagaaggtgttgctgactcataccaggcctgaatcgccccatcatccagccagaaagtgagggagccacggttgatgagagctttgttgtaggtggaccagttggtgattttgaacttttgctttgccacggaacggtctgcgttgtcgggaagatgcgtgatctgatccttcaactcagcaaaagttcgatttattcaacaaagccgccgtcccgtcaagtcagcgtaatgctctgccagtgttacaaccaattaaccaattctgattagaaaaactcatcgagcatcaaatgaaactgcaatttattcatatcaggattatcaataccatatttttgaaaaagccgtttctgtaatgaaggagaaaactcaccgaggcagttccataggatggcaagatcctggtatcggtctgcgattccgactcgtccaacatcaatacaacctattaatttcccctcgtcaaaaataaggttatcaagtgagaaatcaccatgagtgacgactgaatccggtgagaatggcaaaagcttatgcatttctttccagacttgttcaacaggccagccattacgctcgtcatcaaaatcactcgcatcaaccaaaccgttattcattcgtgattgcgcctgagcgagacgaaatacgcgatcgctgttaaaaggacaattacaaacaggaatcgaatgcaaccggcgcaggaacactgccagcgcatcaacaatattttcacctgaatcaggatattcttctaatacctggaatgctgttttcccggggatcgcagtggtgagtaaccatgcatcatcaggagtacggataaaatgcttgatggtcggaagaggcataaattccgtcagccagtttagtctgaccatctcatctgtaacatcattggcaacgctacctttgccatgtttcagaaacaactctggcgcatcgggcttcccatacaatcgatagattgtcgcacctgattgcccgacattatcgcgagcccatttatacccatataaatcagcatccatgttggaatttaatcgcggcctcgagcaagacgtttcccgttgaatatggctcataacaccccttgtattactgtttatgtaagcagacagttttattgttcatgatgatatatttttatcttgtgcaatgtaacatcagagattttgagacacaacgtggctttccccccccccccattattgaagcatttatcagggttattgtctcatgagcggatacatatttgaatgtatttagaaaaataaacaaataggggttccgcgcacatttccccgaaaagtgccacctgacgtctaagaaaccattattatcatgacattaacctataaaaataggcgtatcacgaggccctttcgtc

SEQ ID NO: 74 - DNA, 11395 bp, Artificial Sequence
  Plasmid DNA: 53505
aagctttactcgtaaagcgagttgaaggatcatatttagttgcgtttatgagataagattgaaagcacgtgtaaaatgtttcccgcgcgttggcacaactatttacaatgcggccaagttataaaagattctaatctgatatgttttaaaacacctttgcggcccgagttgtttgcgtacgtgactagcgaagaagatgtgtggaccgcagaacagatagtaaaacaaaaccctagtattggagcaataatcgatttaaccaacacgtctaaatattatgatggtgtgcattttttgcgggcgggcctgttatacaaaaaaattcaagtacctggccagactttgccgcctgaaagcatagttcaagaatttattgacacggtaaaagaatttacagaaaagtgtcccggcatgttggtgggcgtgcactgcacacacggtattaatcgcaccggttacatggtgtgcagatatttaatgcacaccctgggtattgcgccgcaggaagccatagatagattcgaaaaagccagaggtcacaaaattgaaagacaaaattacgttcaagatttattaatttaattaatattatttgcattctttaacaaatactttatcctattttcaaattgttgcgcttcttccagcgaaccaaaactatgcttcgcttgctccgtttagcttgtagccgatcagtggcgttgttccaatcgacggtaggattaggccggatattctccaccacaatgttggcaacgttgatgttacgtttatgcttttggttttccacgtacgtcttttggccggtaatagccgtaaacgtagtgccgtcgcgcgtcacgcacaacaccggatgtttgcgcttgtccgcggggtattgaaccgcgcgatccgacaaatccaccactttggcaactaaatcggtgacctgcgcgtcttttttctgcattatttcgtctttcttttgcatggtttcctggaagccggtgtacatgcggtttagatcagtcatgacgcgcgtgacctgcaaatctttggcctcgatctgcttgtccttgatggcaacgatgcgttcaataaactcttgttttttaacaagttcctcggttttttgcgccaccaccgcttgcagcgcgtttgtgtgctcggtgaatgtcgcaatcagcttagtcaccaactgtttgctctcctcctcccgttgtttgatcgcgggatcgtacttgccggtgcagagcacttgaggaattacttcttctaaaagccattcttgtaattctatggcgtaaggcaatttggacttcataatcagctgaatcacgccggatttagtaatgagcactgtatgcggctgcaaatacagcgggtcgccccttttcacgacgctgttagaggtagggcccccattttggatggtctgctcaaataacgatttgtatttattgtctacatgaacacgtatagctttatcacaaactgtatattttaaactgttagcgacgtccttggccacgaaccggacctgttggtcgcgctctagcacgtaccgcaggttgaacgtatcttctccaaatttaaattctccaattttaacgcgagccattttgatacacgtgtgtcgattttgcaacaactattgttttttaacgcaaactaaacttattgtggtaagcaataattaaatatgggggaacatgcgccgctacaacactcgtcgttatgaacgcagacggcgccggtctcggcgcaagcggctaaaacgtgttgcgcgttcaacgcggcaaacatcgcaaaagccaatagtacagttttgatttgcatattaacggcgattttttaaattatcttatttaataaatagttatgacgcctacaactccccgcccgcgttgactcgctgcacctcgagcagttcgttgacgccttcctccgtgtggccgaacacgtcgagcgggtggtcgatgaccagcggcgtgccgcacgcgacgcacaagtatctgtacaccgaatgatcgtcgggcgaaggcacgtcggcctccaagtggcaatattggcaaattcgaaaatatatacagttgggttgtttgcgcatatctatcgtggcgttgggcatgtacgtccgaacgttgatttgcatgcaagccgaaattaaatcattgcgattagtgcgattaaaacgttgtacatcctcgcttttaatcatgccgtcgattaaatcgcgcaatcgagtcaagtgatcaaagtgtggaataatgttttctttgtattcccgagtcaagcgcagcgcgtattttaacaaactagccatcttgtaagttagtttcatttaatgcaactttatccaataatatattatgtatcgcacgtcaagaattaacaatgcgcccgttgtcgcatctcaacacgactatgatagagatcaaataaagcgcgaattaaatagcttgcgacgcaacgtgcacgatctgtgcacgcgttccggcacgagctttgattgtaataagtttttacgaagcgatgacatgacccccgtagtgacaacgatcacgcccaaaagaactgccgactacaaaattaccgagtatgtcggtgacgttaaaactattaagccatccaatcgaccgttagtcgaatcaggaccgctggtgcgagaagccgcgaagtatggcgaatgcatcgtataacgtgtggagtccgctcattagagcgtcatgtttagacaagaaagctacatatttaattgatcccgatgattttattgataaattgaccctaactccatacacggtattctacaatggcggggttttggtcaaaatttccggactgcgattgtacatgctgttaacggctccgcccactattaatgaaattaaaaattccaattttaaaaaacgcagcaagagaaacatttgtatgaaagaatgcgtagaaggaaagaaaaatgtcgtcgacatgctgaacaacaagattaatatgcctccgtgtataaaaaaaatattgaacgatttgaaagaaaacaatgtaccgcgcggcggtatgtacaggaagaggtttatactaaactgttacattgcaaacgtggtttcgtgtgccaagtgtgaaaaccgatgtttaatcaaggctctgacgcatttctacaaccacgactccaagtgtgtgggtgaagtcatgcatcttttaatcaaatcccaagatgtgtataaaccaccaaactgccaaaaaatgaaaactgtcgacaagctctgtccgtttgctggcaactgcaagggtctcaatcctatttgtaattattgaataataaaacaattataaatgctaaatttgttttttattaacgatacaaaccaaacgcaacaagaacatttgtagtattatctataattgaaaacgcgtagttataatcgctgaggtaatatttaaaatcattttcaaatgattcacagttaatttgcgacaatataattttattttcacataaactagacgccttgtcgtcttcttcttcgtattccttctctttttcatttttctcctcataaaaattaacatagttattatcgtatccatatatgtatctatcgtatagagtaaattttttgttgtcataaatatatatgtcttttttaatggggtgtatagtaccgctgcgcatagtttttctgtaatttacaacagtgctattttctggtagttcttcggagtgtgttgctttaattattaaatttatataatcaatgaatttgggatcgtcggttttgtacaatatgttgccggcatagtacgcagcttcttctagttcaattacaccattttttagcagcaccggattaacataactttccaaaatgttgtacgaaccgttaaacaaaaacagttcacctcccttttctatactattgtctgcgagcagttgtttgttgttaaaaataacagccattgtaatgagacgcacaaactaatatcacaaactggaaatgtctatcaatatatagttgctgatatcatggagataattaaaatgataaccatctcgcaaataaataagtattttactgttttcgtaacagttttgtaataaaaaaacctataaatattccggattattcataccgtcccaccatcgggcgcggatctatgctactagtaaatcagtcacaccaaggcttcaataaggaacacacaagcaagatggtaagcgctattgttttatatgtgcttttggcggcggcggcgcattctgcctttgcggcggatcccgggagccagaagctgcccggcaacgataatagcaccgccacactgtgtctgggacaccacgccgtgcctaatggcaccatcgtgaaaacaatcaccaacgaccagatcgaggtgaccaatgccacagagctggtgcagtctagcagcacaggcggcatctgtgatagccctcaccagatcctggatggcgagaactgtaccctgatcgatgccctgctgggagatcctcagtgtgacggcttccagaacaaaaagtgggacctgttcgtggagagaagcaaggcctacagcaactgctacccctacgacgtgcctgattacgccagcctgagatctctggtggcctcttctggcaccctggagttcaacaacgagagcttcaactgggccggagtgacacagaatggcaccagcagcgcctgtaagcggagaagcaacaagagcttcttcagcaggctgaactggctgacccacctgaagtacaagtaccccgccctgaatgtgaccatgcccaacaatgagaagttcgacaagctgtacatctggggagtgcaccaccctgtgaccgatagcgatcagatcagcctgtatgcccaggccagcggaagaatcacagtgagcaccaagagaagccagcagaccgtgatccccaacatcggctacagacccagagtgagggacatcagcagccggatcagcatctactggacaatcgtgaagcctggcgacatcctgctgatcaacagcaccggcaatctgattgcccccaggggctacttcaagatcaggagcggcaagagcagcatcatgagaagcgatgcccctatcggcaagtgtaacagcgagtgtatcacccccaatggcagcatccccaacgacaagcccttccagaacgtgaaccggatcacctatggcgcctgccctagatacgtgaagcagaacaccctgaagctggccaccggcatgagaaatgtgccccagagagagaccagaggcatctttggagccatcgccggattcatcgagaatggctgggagggaatggtggatggctggtacggcttcagacaccagaatagcgagggaacaggacaggccgccgatctgaaatctacacaggccgccatcaaccagatcaacggcaagctgaacaggctgatcggcaagaccaacgagaagttccaccagatcgaaaaggaattcagcgaggtggagggcagaatccaggacctggagaagtacgtggaggacaccaagatcgacctgtggagctacaatgccgaactgctggtggccctggagaatcagcacaccatcgacctgaccgacagcgagatgaacaagctgttcgagcggaccaagaagcagctgcgcgagaacgccgaggatatgggcaatggctgctttaagatctaccacaagtgtgacaacgcctgtatcgagagcatccggaacggcacctacgatcacgacgtgtacagagatgaggccctgaacaaccggtttcagatcagcggcagactggtgcctagaggatctcctggcagcggatatattcctgaggcccctagagatggacaggcctatgtgagaaaggatggcgaatgggtgctgctgtctacatttctgggacaccaccatcaccaccattgatgagcggccgctgcagatctgatcctttcctgggacccggcaagaaccaaaaactcactctcttcaaggaaatccgtaatgttaaacccgacacgatgaagcttgtcgttggatggaaaggaaaagagttctacagggaaacttggacccgcttcatggaagacagcttccccattgttaacgaccaagaagtgatggatgttttccttgttgtcaacatgcgtcccactagacccaaccgttgttacaaattcctggcccaacacgctctgcgttgcgaccccgactatgtacctcatgacgtgattaggatcgtcgagccttcatgggtgggcagcaacaacgagtaccgcatcagcctggctaagaagggcggcggctgcccaataatgaaccttcactctgagtacaccaactcgttcgaacagttcatcgatcgtgtcatctgggagaacttctacaagcccatcgtttacatcggtaccgactctgctgaagaggaggaaattctccttgaagtttccctggtgttcaaagtaaaggagtttgcaccagacgcacctctgttcactggtccggcgtattaaaacacgatacattgttattagtacatttattaagcgctagattctgtgcgttgttgatttacagacaattgttgtacgtattttaataattcattaaatttataatctttagggtggtatgttagagcgaaaatcaaatgattttcagcgtctttatatctgaatttaaatattaaatcctcaatagatttgtaaaataggtttcgattagtttcaaacaagggttgtttttccgaaccgatggctggactatctaatggattttcgctcaacgccacaaaacttgccaaatcttgtagcagcaatctagctttgtcgatattcgtttgtgttttgttttgtaataaaggttcgacgtcgttcaaaatattatgcgcttttgtatttctttcatcactgtcgttagtgtacaattgactcgacgtaaacacgttaaataaagcttggacatatttaacatcgggcgtgttagctttattaggccgattatcgtcgtcgtcccaaccctcgtcgttagaagttgcttccgaagacgattttgccatagccacacgacgcctattaattgtgtcggctaacacgtccgcgatcaaatttgtagttgagctttttggaattatttctgattgcgggcgtttttgggcgggtttcaatctaactgtgcccgattttaattcagacaacacgttagaaagcgatggtgcaggcggtggtaacatttcagacggcaaatctactaatggcggcggtggtggagctgatgataaatctaccatcggtggaggcgcaggcggggctggcggcggaggcggaggcggaggtggtggcggtgatgcagacggcggtttaggctcaaatgtctctttaggcaacacagtcggcacctcaactattgtactggtttcgggcgccgtttttggtttgaccggtctgagacgagtgcgatttttttcgtttctaatagcttccaacaattgttgtctgtcgtctaaaggtgcagcgggttgaggttccgtcggcattggtggagcgggcggcaattcagacatcgatggtggtggtggtggtggaggcgctggaatgttaggcacgggagaaggtggtggcggcggtgccgccggtataatttgttctggtttagtttgttcgcgcacgattgtgggcaccggcgcaggcgccgctggctgcacaacggaaggtcgtctgcttcgaggcagcgcttggggtggtggcaattcaatattataattggaatacaaatcgtaaaaatctgctataagcattgtaatttcgctatcgtttaccgtgccgatatttaacaaccgctcaatgtaagcaattgtattgtaaagagattgtctcaagctccgcacgccgataacaagccttttcatttttactacagcattgtagtggcgagacacttcgctgtcgtcgacgtacatgtatgctttgttgtcaaaaacgtcgttggcaagctttaaaatatttaaaagaacatctctgttcagcaccactgtgttgtcgtaaatgttgtttttgataatttgcgcttccgcagtatcgacacgttcaaaaaattgatgcgcatcaattttgttgttcctattattgaataaataagattgtacagattcatatctacgattcgtcatggccaccacaaatgctacgctgcaaacgctggtacaattttacgaaaactgcaaaaacgtcaaaactcggtataaaataatcaacgggcgctttggcaaaatatctattttatcgcacaagcccactagcaaattgtatttgcagaaaacaatttcggcgcacaattttaacgctgacgaaataaaagttcaccagttaatgagcgaccacccaaattttataaaaatctattttaatcacggttccatcaacaaccaagtgatcgtgatggactacattgactgtcccgatttatttgaaacactacaaattaaaggcgagctttcgtaccaacttgttagcaatattattagacagctgtgtgaagcgctcaacgatttgcacaagcacaatttcatacacaacgacataaaactcgaaaatgtcttatatttcgaagcacttgatcgcgtgtatgtttgcgattacggattgtgcaaacacgaaaactcacttagcgtgcacgacggcacgttggagtattttagtccggaaaaaattcgacacacaactatgcacgtttcgtttgactggtacgcggcgtgttaacatacaagttgctaaccggcggttcgtaatcatggtcatagctgtttcctgtgtgaaattgttatccgctcacaattccacacaacatacgagccggaagcataaagtgtaaagcctggggtgcctaatgagtgagctaactcacattaattgcgttgcgctcactgcccgctttccagtcgggaaacctgtcgtgccagctgcattaatgaatcggccaacgcgcggggagaggcggtttgcgtattgggcgctcttccgcttcctcgctcactgactcgctgcgctcggtcgttcggctgcggcgagcggtatcagctcactcaaaggcggtaatacggttatccacagaatcaggggataacgcaggaaagaacatgtgagcaaaaggccagcaaaaggccaggaaccgtaaaaaggccgcgttgctggcgtttttccataggctccgcccccctgacgagcatcacaaaaatcgacgctcaagtcagaggtggcgaaacccgacaggactataaagataccaggcgtttccccctggaagctccctcgtgcgctctcctgttccgaccctgccgcttaccggatacctgtccgcctttctcccttcgggaagcgtggcgctttctcatagctcacgctgtaggtatctcagttcggtgtaggtcgttcgctccaagctgggctgtgtgcacgaaccccccgttcagcccgaccgctgcgccttatccggtaactatcgtcttgagtccaacccggtaagacacgacttatcgccactggcagcagccactggtaacaggattagcagagcgaggtatgtaggcggtgctacagagttcttgaagtggtggcctaactacggctacactagaaggacagtatttggtatctgcgctctgctgaagccagttaccttcggaaaaagagttggtagctcttgatccggcaaacaaaccaccgctggtagcggtggtttttttgtttgcaagcagcagattacgcgcagaaaaaaaggatctcaagaagatcctttgatcttttctacggggtctgacgctcagtggaacgaaaactcacgttaagggattttggtcatgagattatcaaaaaggatcttcacctagatccttttaaattaaaaatgaagttttaaatcaatctaaagtatatatgagtaaacttggtctgacagttaccaatgcttaatcagtgaggcacctatctcagcgatctgtctatttcgttcatccatagttgcctgactccccgtcgtgtagataactacgatacgggagggcttaccatctggccccagtgctgcaatgataccgcgagacccacgctcaccggctccagatttatcagcaataaaccagccagccggaagggccgagcgcagaagtggtcctgcaactttatccgcctccatccagtctattaattgttgccgggaagctagagtaagtagttcgccagttaatagtttgcgcaacgttgttgccattgctacaggcatcgtggtgtcacgctcgtcgtttggtatggcttcattcagctccggttcccaacgatcaaggcgagttacatgatcccccatgttgtgcaaaaaagcggttagctccttcggtcctccgatcgttgtcagaagtaagttggccgcagtgttatcactcatggttatggcagcactgcataattctcttactgtcatgccatccgtaagatgcttttctgtgactggtgagtactcaaccaagtcattctgagaatagtgtatgcggcgaccgagttgctcttgcccggcgtcaatacgggataataccgcgccacatagcagaactttaaaagtgctcatcattggaaaacgttcttcggggcgaaaactctcaaggatcttaccgctgttgagatccagttcgatgtaacccactcgtgcacccaactgatcttcagcatcttttactttcaccagcgtttctgggtgagcaaaaacaggaaggcaaaatgccgcaaaaaagggaataagggcgacacggaaatgttgaatactcatactcttcctttttcaatattattgaagcatttatcagggttattgtctcatgagcggatacatatttgaatgtatttagaaaaataaacaaataggggttccgcgcacatttccccgaaaagtgccacctgacgtctaagaaaccattattatcatgacattaacctataaaaataggcgtatcacgaggccctttcgtctcgcgcgtttcggtgatgacggtgaaaacctctgacacatgcagctcccggagacggtcacagcttgtctgtaagcggatgccgggagcagacaagcccgtcagggcgcgtcagcgggtgttggcgggtgtcggggctggcttaactatgcggcatcagagcagattgtactgagagtgcaccatatgcggtgtgaaataccgcacagatgcgtaaggagaaaataccgcatcaggcgccattcgccattcaggctgcgcaactgttgggaagggcgatcggtgcgggcctcttcgctattacgccagctggcgaaagggggatgtgctgcaaggcgattaagttgggtaacgccagggttttcccagtcacgacgttgtaaaacgacggccagtgcc

SEQ ID NO: 75 - DNA, 4885 bp, Artificial Sequence
  Plasmid DNA: 54508
agcgcccaatacgcaaaccgcctctccccgcgcgttggccgattcattaatgcagctggcacgacaggtttcccgactggaaagcgggcagtgagcgcaacgcaattaatgtgagttagctcactcattaggcaccccaggctttacactttatgcttccgcggctcgtatgttgtgtggaattgtgagcggataacaatttcacacaggaaacagctatgaccatgattacgccactagtccgaggcctcgagatctatcgatgcatgccatggtaccaaatctagagatatcgccaccatggagaagattgtgctgctgttcgccattgtgagcctggtgaagagcgatcagatctgtattggctaccacgccaacaattctacagagcaggtggacaccatcatggagaaaaacgtgacagtgacacacgctcaggacatcctggagaaaacccacaatggcaagctgtgtgatctggatggagtgaagcctctgatcctgagagattgttctgtggctggatggctgctgggaaaccctatgtgtgacgagttcatcaatgtgcctgagtggagctatatcgtggagaaggccaaccctgtgaatgatctgtgttaccccggcgacttcaatgattacgaggagctgaagcacctgctgtccagaatcaaccacttcgagaagatccagatcatccctaagtctagctggtctagccatgaagcttctctgggagtgtctagcgcttgtccctatcagagaaagagcagcttcttcagaaatgtggtgtggctgatcaagaagaacagcacctaccccacaatcaagcggagctacaacaacaccaaccaggaagatctgctggtcctgtggggaattcaccatcctaatgatgccgccgagcagacaaagctgtaccagaaccccaccacatatatctctgtgggcaccagcacactgaatcagagactggtgcctagaatcgccacaagatccaaggtgaacggccagtctggcagaatggagttcttctggaccatcctgaagccaaacgacgccatcaacttcgagagcaacggcaatttcatcgcccctgagtacgcctataagatcgtgaagaagggcgatagcaccatcatgaagagcgagctggagtacggcaactgtaataccaagtgccagacacctatgggcgccatcaatagctctatgcccttccacaatatccaccctctgacaatcggcgagtgtcctaagtacgtgaagagcaacagactggtgctggctacaggcctgagaaatagccctcagagagagacaagaggactgtttggagccatcgccggattcattgaagggggatggcagggaatggtcgatggctggtatggctatcaccacagcaatgagcagggatctggatatgccgccgataaggagtctacacagaaggccatcgacggcgtcacaaacaaggtgaacagcatcatcgacaagatgaacacccagtttgaggctgtgggcagagagttcaacaacctggagcggagaatcgagaacctgaacaagaagatggaggacggctttctggatgtgtggacctataatgccgaactgctggtgctgatggagaacgagagaaccctggatttccacgacagcaacgtgaagaacctgtacgacaaagtgagactgcagctgagagataatgccaaggaactgggcaatggctgcttcgagttctaccacaagtgtgacaacgagtgtatggagtctgtgagaaacggcacctacgattaccctcagtactctgaggaagccagactgaagcgcgaggagatctctggcgtgaagctggagagcatcggcatctatcagatcggaggaggatctggaggaggaagtggctcttctggaaggctggtgccaagaggatctcctggcagcggatatattcctgaggcccctagagatggacaggcctatgtgagaaaggatggcgaatgggtgctgctgtctacatttctgggacaccaccaccatcaccattgatgaacacgtgggatccgtaaaggagctcgaattcgaagcttctgcagacgcgtcgacgtcatatggatccgatatcgccgtggcggccgctctagaactagtggatcgatccccaattcgccctatagtgagtcgtattacaattcactggccgtcgttttacaacgtcgtgactgggaaaaccctggcgttacccaacttaatcgccttgcagcacatccccctttcgccagctggcgtaatagcgaagaggcccgcaccgatcgcccttcccaacagttgcgcagcctgaatggcgaatggcgcctgatgcggtattttctccttacgcatctgtgcggtatttcacaccgcatacgtcaaagcaaccatagtacgcgccctgtagcggcgcattaagcgcggcgggtgtggtggttacgcgcagcgtgaccgctacacttgccagcgccctagcgcccgctcctttcgctttcttcccttcctttctcgccacgttcgccggctttccccgtcaagctctaaatcggggtgggccatcgccctgatagacggtttttcgccctttgacgttggagtccacgttctttaatagtggactcttgttccaaactggaacaacactcaaccctatctcgggctattcttttgatttataagggattttgccgatttcggcctattggttaaaaaatgagctgatttaacaaaaatttaacgcgaattttaacaaaatattaacgtttacaattttatggtgcactctcagtacaatctgctctgatgccgcatagttaagccagccccgacacccgccaacacccgctgacgcgccctgacgggcttgtctgctcccggcatccgcttacagacaagctgtgaccgtctccgggagctgcatgtgtcagaggttttcaccgtcatcaccgaaacgcgcgagacgaaagggcctcgtgatacgcctatttttataggttaatgtcatgggggggggcacgttgtgtctcaaaatctctgatgttacattgcacaagataaaaatatatcatcatgaacaataaaactgtctgcttacataaacagtaatacaaggggtgttatgagccatattcaacgggaaacgtcttgctcgacgaggccgcgattaaattccaacatggatgctgatttatatgggtataaatgggctcgcgataatgtcgggcaatcaggtgcgacaatctaccgattgtatgggaagcccgatgcgccagagttgtttctgaaacatggcaaaggtagcgttgccaatgatgttacagatgagatggtcagactaaactggctgacggaatttatgcctcttccgaccatcaagcattttatccgtactcctgatgatgcatggttactcaccactgcgatccctgggaaaacagcattccaggtattagaagaatatcctgattcaggtgaaaatattgttgatgcgctggcagtgttcctgcgccggttgcattcgattcctgtttgtaattgtccttttaacagcgatcgcgtatttcgtctcgctcaggcgcaatcacgaatgaataacggtttggttgatgcgagtgattttgatgacgagcgtaatggctggcctgttgaacaagtctggaaagaaatgcataagctcttgccattctcaccggattcagtcgtcactcatggtgatttctcacttgataaccttatttttgacgaggggaaattaataggttgtattgatgttggacgagtcggaatcgcagaccgataccaggatcttgccatcctatggaactgcctcggtgagttttctccttcattacagaaacggctttttcaaaaatatggtattgataatcctgatatgaataaattgcagtttcatttgatgctcgatgagtttttctaatcagaattggttaattggttgtaacactggcagagcattacgctgacttgacgggacggcgcaagctcatgaccaaaatcccttaacgtgagttttcgttccactgagcgtcagaccccgtagaaaagatcaaaggatcttcttgagatcctttttttctgcgcgtaatctgctgcttgcaaacaaaaaaaccaccgctaccagcggtggtttgtttgccggatcaagagctaccaactctttttccgaaggtaactggcttcagcagagcgcagataccaaatactgtccttctagtgtagccgtagttaggccaccacttcaagaactctgtagcaccgcctacatacctcgctctgctaatcctgttaccagtggctgctgccagtggcgataagtcgtgtcttaccgggttggactcaagacgatagttaccggataaggcgcagcggtcgggctgaacggggggttcgtgcacacagcccagcttggagcgaacgacctacaccgaactgagatacctacagcgtgagcattgagaaagcgccacgcttcccgaagggagaaaggcggacaggtatccggtaagcggcagggtcggaacaggagagcgcacgagggagcttccagggggaaacgcctggtatctttatagtcctgtcgggtttcgccacctctgacttgagcgtcgatttttgtgatgctcgtcaggggggcggagcctatggaaaaacgccagcaacgcggcctttttacggttcctggccttttgctggccttttgctcacatgttctttcctgcgttatcccctgattctgtggataaccgtattaccgcctttgagtgagctgataccgctcgccgcagccgaacgaccgagcgcagcgagtcagtgagcgaggaagcggaag

SEQ ID NO: 76 - DNA, 6108 bp, Artificial Sequence
  Plasmid DNA: 53323
tcgcgcgtttcggtgatgacggtgaaaacctctgacacatgcagctcccggagacggtcacagcttgtctgtaagcggatgccgggagcagacaagcccgtcagggcgcgtcagcgggtgttggcgggtgtcggggctggcttaactatgcggcatcagagcagattgtactgagagtgcaccatatgcggtgtgaaataccgcacagatgcgtaaggagaaaataccgcatcagattggctattggccattgcatacgttgtatccatatcataatatgtacatttatattggctcatgtccaacattaccgccatgttgacattgattattgactagttattaatagtaatcaattacgggaacttccatagcccatatatggagttccgcgttacataacttacgggaatttccaaacctggctgaccgcccaacgacccccgcccattgacgtcaataatgacgtatgttcccatagtaacgccaatagggaacttccattgacgtcaatgggtggagtatttacggtaaactgcccacttgggaatttccaagtgtatcatatgccaagtacgccccctattgacgtcaatgacgggaacttccataagcttgcattatgcccagtacatgaccttatgggaatttcctacttggcagtacatctacgtattagtcatcgctattaccatggtgatgcggttttggcagtacatcaatgggcgtggatagcggtttgactcacgggaacttccaagtctccaccccattgacgtcaatgggagtttgttttgactcaccaaaatcaacgggaatttccaaaatgtcgtaacaactccgccccattgacgcaaatgggcggtaggcgtgtacggtgggaggtctatataagcagagctcgtttagtgaaccgtcagatcgcctggagacgccatccacgctgttttgacctccatagaagacaccgggaccgatccagcctccatcggctcgcatctctccttcacgcgcccgccgccctacctgaggccgccatccacgccggttgagtcgcgttctgccgcctcccgcctgtggtgcctcctgaactgcgtccgccgtctaggtaagtttaaagctcaggtcgagaccgggcctttgtccggcgctcccttggagcctacctagactcagccggctctccacgctttgcctgaccctgcttgctcaactctagttaacggtggagggcagtgtagtctgagcagtactcgttgctgccgcgcgcgccaccagacataatagctgacagactaacagactgttcctttccatgggtcttttctgcagtcaccgtcgtcgacacgtgtgatcagatatcgcggccgctctagagatatcgccaccatgaacacccagatcctgattctggccctggtggccatcattcccaccaacgccgacaagatctgtctgggacaccacgccgtgtctaatggcgccaaggtgaacaccctgaccgagaggggcgtggaagtggtgaatgccaccgagaccgtggagagaaccaacgtgcccaggatctgtagcaagggcaagagaaccgtggatctgggacagtgtggactgctgggcacaatcacaggacccccccagtgtgatcagttcctggagttcagcgccgatctgatcatcgagcggagagaaggcaacgatgtgtgctaccccggcaagttcgtgaatgaggaggccctgaggcagatcctgagaaagagcggcggcatcgacaaggaaaccatgggcttcacctacagcggcatcagaaccaatggagccacctccgcctgtagaagaagcggcagcagcttctacgccgagatgaagtggctgctgtccaacacagacaatgccgccttcccccagatgaccaagagctacaagaacatcaggaaggaccccgccctgatcatttggggcatccaccactctggatctacagccgagcagaccaagctgtatggcagcggcaacaagctgatcacagtgggcagcagcaattaccagcagagcttcgtgccttctcctggagccagacctcaggtgaacggccagagcggcagaatcgatttccactggctgatgctgaaccccaacgacaccgtgaccttcagcttcaacggcgcctttatcgcccctgatagggcctctttcctgaggggcaagagcatgggcatccagtctgaagtgcaggtggacgccaattgtgagggcgattgctaccacagcggcggcacaattctgagcagcctgcccttccagaacatcaacagcaggacagtgggcgagtgtcccagatatgtgaagcaggagagcctgctgctggccacaggcatgaagaacgtgcccgagatccccaagggcagaggcctgtttggagccatcgccggattcatcgagaatggctgggagggactggtggatggctggtacggcttcagacaccagaatgcccagggagaaggaacagccgccgactacaagtctacacagagcgccatcgatcagatcaccggcaagctgaacaggctgatcgagaaaaccaatcagcagtttgagctgatcgacaacgagttcaccgaggtggagaagcagatcggcaacgtgatcaactggaccagagacagcctgacagagatgtggagctacaacgccgaactgctggtggccatggagaatcagcacaccatcgacctggccgacagcgagatgaacaagctgtacgagagagtgaggaggcagctgagagagaatgccgaggaggacggcacaggctgcttcgagatcttccacaagtgtgacgacgactgtatggccagcatccggaacaacacctacgaccacagcaagtacagagaggaggccatccagaacagaatccagatcgaccccgtgaaactgagcagcggctacaaggatgtgatcctgtggttcagctttggcgccagctgctttatcctgctggccatcgccatgggcctggtgttcatctgtgtgaagaacggcaacatgaggtgtaccatctgtatctgatgaacacgtgggatccagatctgctgtgccttctagttgccagccatctgttgtttgcccctcccccgtgccttccttgaccctggaaggtgccactcccactgtcctttcctaataaaatgaggaaattgcatcgcattgtctgagtaggtgtcattctattctggggggtggggtggggcaggacagcaagggggaggattgggaagacaatagcaggcatgctggggatgcggtgggctctatgggtacccaggtgctgaagaattgacccggttcctcctgggccagaaagaagcaggcacatccccttctctgtgacacaccctgtccacgcccctggttcttagttccagccccactcataggacactcatagctcaggagggctccgccttcaatcccacccgctaaagtacttggagcggtctctccctccctcatcagcccaccaaaccaaacctagcctccaagagtgggaagaaattaaagcaagataggctattaagtgcagagggagagaaaatgcctccaacatgtgaggaagtaatgagagaaatcatagaattttaaggccatgatttaaggccatcatggccttaatcttccgcttcctcgctcactgactcgctgcgctcggtcgttcggctgcggcgagcggtatcagctcactcaaaggcggtaatacggttatccacagaatcaggggataacgcaggaaagaacatgtgagcaaaaggccagcaaaaggccaggaaccgtaaaaaggccgcgttgctggcgtttttccataggctccgcccccctgacgagcatcacaaaaatcgacgctcaagtcagaggtggcgaaacccgacaggactataaagataccaggcgtttccccctggaagctccctcgtgcgctctcctgttccgaccctgccgcttaccggatacctgtccgcctttctcccttcgggaagcgtggcgctttctcatagctcacgctgtaggtatctcagttcggtgtaggtcgttcgctccaagctgggctgtgtgcacgaaccccccgttcagcccgaccgctgcgccttatccggtaactatcgtcttgagtccaacccggtaagacacgacttatcgccactggcagcagccactggtaacaggattagcagagcgaggtatgtaggcggtgctacagagttcttgaagtggtggcctaactacggctacactagaagaacagtatttggtatctgcgctctgctgaagccagttaccttcggaaaaagagttggtagctcttgatccggcaaacaaaccaccgctggtagcggtggtttttttgtttgcaagcagcagattacgcgcagaaaaaaaggatctcaagaagatcctttgatcttttctacggggtctgacgctcagtggaacgaaaactcacgttaagggattttggtcatgagattatcaaaaaggatcttcacctagatccttttaaattaaaaatgaagttttaaatcaatctaaagtatatatgagtaaacttggtctgacagttaccaatgcttaatcagtgaggcacctatctcagcgatctgtctatttcgttcatccatagttgcctgactcggggggggggggcgctgaggtctgcctcgtgaagaaggtgttgctgactcataccaggcctgaatcgccccatcatccagccagaaagtgagggagccacggttgatgagagctttgttgtaggtggaccagttggtgattttgaacttttgctttgccacggaacggtctgcgttgtcgggaagatgcgtgatctgatccttcaactcagcaaaagttcgatttattcaacaaagccgccgtcccgtcaagtcagcgtaatgctctgccagtgttacaaccaattaaccaattctgattagaaaaactcatcgagcatcaaatgaaactgcaatttattcatatcaggattatcaataccatatttttgaaaaagccgtttctgtaatgaaggagaaaactcaccgaggcagttccataggatggcaagatcctggtatcggtctgcgattccgactcgtccaacatcaatacaacctattaatttcccctcgtcaaaaataaggttatcaagtgagaaatcaccatgagtgacgactgaatccggtgagaatggcaaaagcttatgcatttctttccagacttgttcaacaggccagccattacgctcgtcatcaaaatcactcgcatcaaccaaaccgttattcattcgtgattgcgcctgagcgagacgaaatacgcgatcgctgttaaaaggacaattacaaacaggaatcgaatgcaaccggcgcaggaacactgccagcgcatcaacaatattttcacctgaatcaggatattcttctaatacctggaatgctgttttcccggggatcgcagtggtgagtaaccatgcatcatcaggagtacggataaaatgcttgatggtcggaagaggcataaattccgtcagccagtttagtctgaccatctcatctgtaacatcattggcaacgctacctttgccatgtttcagaaacaactctggcgcatcgggcttcccatacaatcgatagattgtcgcacctgattgcccgacattatcgcgagcccatttatacccatataaatcagcatccatgttggaatttaatcgcggcctcgagcaagacgtttcccgttgaatatggctcataacaccccttgtattactgtttatgtaagcagacagttttattgttcatgatgatatatttttatcttgtgcaatgtaacatcagagattttgagacacaacgtggctttccccccccccccattattgaagcatttatcagggttattgtctcatgagcggatacatatttgaatgtatttagaaaaataaacaaataggggttccgcgcacatttccccgaaaagtgccacctgacgtctaagaaaccattattatcatgacattaacctataaaaataggcgtatcacgaggccctttcgtc

SEQ ID NO: 77 - DNA, 6126 bp, Artificial Sequence
  Plasmid DNA: 53344
tcgcgcgtttcggtgatgacggtgaaaacctctgacacatgcagctcccggagacggtcacagcttgtctgtaagcggatgccgggagcagacaagcccgtcagggcgcgtcagcgggtgttggcgggtgtcggggctggcttaactatgcggcatcagagcagattgtactgagagtgcaccatatgcggtgtgaaataccgcacagatgcgtaaggagaaaataccgcatcagattggctattggccattgcatacgttgtatccatatcataatatgtacatttatattggctcatgtccaacattaccgccatgttgacattgattattgactagttattaatagtaatcaattacgggaacttccatagcccatatatggagttccgcgttacataacttacgggaatttccaaacctggctgaccgcccaacgacccccgcccattgacgtcaataatgacgtatgttcccatagtaacgccaatagggaacttccattgacgtcaatgggtggagtatttacggtaaactgcccacttgggaatttccaagtgtatcatatgccaagtacgccccctattgacgtcaatgacgggaacttccataagcttgcattatgcccagtacatgaccttatgggaatttcctacttggcagtacatctacgtattagtcatcgctattaccatggtgatgcggttttggcagtacatcaatgggcgtggatagcggtttgactcacgggaacttccaagtctccaccccattgacgtcaatgggagtttgttttgactcaccaaaatcaacgggaatttccaaaatgtcgtaacaactccgccccattgacgcaaatgggcggtaggcgtgtacggtgggaggtctatataagcagagctcgtttagtgaaccgtcagatcgcctggagacgccatccacgctgttttgacctccatagaagacaccgggaccgatccagcctccatcggctcgcatctctccttcacgcgcccgccgccctacctgaggccgccatccacgccggttgagtcgcgttctgccgcctcccgcctgtggtgcctcctgaactgcgtccgccgtctaggtaagtttaaagctcaggtcgagaccgggcctttgtccggcgctcccttggagcctacctagactcagccggctctccacgctttgcctgaccctgcttgctcaactctagttaacggtggagggcagtgtagtctgagcagtactcgttgctgccgcgcgcgccaccagacataatagctgacagactaacagactgttcctttccatgggtcttttctgcagtcaccgtcgtcgacacgtgtgatcagatatcgcggccgctctagagatatcgccaccatgatcgccatcatcatcattaccatcctggccaccacaggcaagagcgacaagatctgtatcggctaccacgccaacaatagcaccacccaggtggacacaatcctggagaagaacgtgaccgtgacacactctgtggagctgctggagaaccagaaggaggagcggttctgtaaggtgctgaacagagcccctctggatctgaggagctgtacaatcgagggctggattctgggcaaccccagatgtgatctgctgctgggcgatcagtggtggagctacatcgtggagagacccacagcccagaatggcatctgttaccccggcgtgctgaatgatgtggaggagctgaaggccctgatcggcagcggagagaaggtggagagattcgagatgttccccaagtctacatgggccggagtggatacaaatagcggcgtgtccagcgcctgtccttacaccaccggcagcagcttctacagaaacctgctgtggatcatcaagacccgcagcagcgcctatcctgtgatcaggggcacctacaacaacaccggcaaccagcccatcctgtacttttggggcgtgcaccaccctccagataccaacgagcagaacaccctgtacggcagcggcgacagatatgtgagaatgggcaccgagaggatgaatttcgccaagggccctgaaattgccgccagacctgccgtgaatggccagagaggccggatcgattactactggagcgtgctgaagcctggcgagacactgaacgtggagagcaacggcaatctgatcgccccttggtacgcctacagattcgtgtccaccgatagaaagggcgccgtgttcaagagcaacctgcccatcgagaactgtgatgccacctgtcagacaattgccggggtgctgaggaccaataagaccttccagaacgtgtcccctctgtggatcggcgagtgccctaagtatgtgaagagcgagagcctgagactggccacaggcctgagaaacatcccccagatcgagaccagaggactgtttggagccatcgccggattcatcgagggaggatggaccggaatgatcgatggctggtacggctaccaccacgagaatagccagggctctggatatgccgccgatagagagtctacccagaaggccatcgacggcatcaccaacaaggtgaacagcatcatcgacaagatgaacacccagttcgaggccgtggatcacgagttcagcaacctggagcggagaatcgacaacctgaacaagaggatggaggacggctttctggatgtgtggacctacaatgccgagctgctgatcctgctggaaaacgagaggaccctggacatgcacgacgccaacgtgaagaacctgtacgagaaggtgaagagccagctgagagacaacgccaacgatctgggcaatggctgcttcgagttctggcacaagtgtgacaacgactgtatcgagagcgtgaagaacggcacctataactaccccaagtaccaggccgagagcagactgaacaggcagaccatcgagtctgtgaagctggagaatctgggcgtgtatcagatcctggccatctacagcacagtgccttctagcctggtgctggtgggactgattctggccatgggagtgtggatgtgtagcaacggcagcatgcagtgccggatctgtatctgatgaacacgtgggatccagatctgctgtgccttctagttgccagccatctgttgtttgcccctcccccgtgccttccttgaccctggaaggtgccactcccactgtcctttcctaataaaatgaggaaattgcatcgcattgtctgagtaggtgtcattctattctggggggtggggtggggcaggacagcaagggggaggattgggaagacaatagcaggcatgctggggatgcggtgggctctatgggtacccaggtgctgaagaattgacccggttcctcctgggccagaaagaagcaggcacatccccttctctgtgacacaccctgtccacgcccctggttcttagttccagccccactcataggacactcatagctcaggagggctccgccttcaatcccacccgctaaagtacttggagcggtctctccctccctcatcagcccaccaaaccaaacctagcctccaagagtgggaagaaattaaagcaagataggctattaagtgcagagggagagaaaatgcctccaacatgtgaggaagtaatgagagaaatcatagaattttaaggccatgatttaaggccatcatggccttaatcttccgcttcctcgctcactgactcgctgcgctcggtcgttcggctgcggcgagcggtatcagctcactcaaaggcggtaatacggttatccacagaatcaggggataacgcaggaaagaacatgtgagcaaaaggccagcaaaaggccaggaaccgtaaaaaggccgcgttgctggcgtttttccataggctccgcccccctgacgagcatcacaaaaatcgacgctcaagtcagaggtggcgaaacccgacaggactataaagataccaggcgtttccccctggaagctccctcgtgcgctctcctgttccgaccctgccgcttaccggatacctgtccgcctttctcccttcgggaagcgtggcgctttctcatagctcacgctgtaggtatctcagttcggtgtaggtcgttcgctccaagctgggctgtgtgcacgaaccccccgttcagcccgaccgctgcgccttatccggtaactatcgtcttgagtccaacccggtaagacacgacttatcgccactggcagcagccactggtaacaggattagcagagcgaggtatgtaggcggtgctacagagttcttgaagtggtggcctaactacggctacactagaagaacagtatttggtatctgcgctctgctgaagccagttaccttcggaaaaagagttggtagctcttgatccggcaaacaaaccaccgctggtagcggtggtttttttgtttgcaagcagcagattacgcgcagaaaaaaaggatctcaagaagatcctttgatcttttctacggggtctgacgctcagtggaacgaaaactcacgttaagggattttggtcatgagattatcaaaaaggatcttcacctagatccttttaaattaaaaatgaagttttaaatcaatctaaagtatatatgagtaaacttggtctgacagttaccaatgcttaatcagtgaggcacctatctcagcgatctgtctatttcgttcatccatagttgcctgactcggggggggggggcgctgaggtctgcctcgtgaagaaggtgttgctgactcataccaggcctgaatcgccccatcatccagccagaaagtgagggagccacggttgatgagagctttgttgtaggtggaccagttggtgattttgaacttttgctttgccacggaacggtctgcgttgtcgggaagatgcgtgatctgatccttcaactcagcaaaagttcgatttattcaacaaagccgccgtcccgtcaagtcagcgtaatgctctgccagtgttacaaccaattaaccaattctgattagaaaaactcatcgagcatcaaatgaaactgcaatttattcatatcaggattatcaataccatatttttgaaaaagccgtttctgtaatgaaggagaaaactcaccgaggcagttccataggatggcaagatcctggtatcggtctgcgattccgactcgtccaacatcaatacaacctattaatttcccctcgtcaaaaataaggttatcaagtgagaaatcaccatgagtgacgactgaatccggtgagaatggcaaaagcttatgcatttctttccagacttgttcaacaggccagccattacgctcgtcatcaaaatcactcgcatcaaccaaaccgttattcattcgtgattgcgcctgagcgagacgaaatacgcgatcgctgttaaaaggacaattacaaacaggaatcgaatgcaaccggcgcaggaacactgccagcgcatcaacaatattttcacctgaatcaggatattcttctaatacctggaatgctgttttcccggggatcgcagtggtgagtaaccatgcatcatcaggagtacggataaaatgcttgatggtcggaagaggcataaattccgtcagccagtttagtctgaccatctcatctgtaacatcattggcaacgctacctttgccatgtttcagaaacaactctggcgcatcgggcttcccatacaatcgatagattgtcgcacctgattgcccgacattatcgcgagcccatttatacccatataaatcagcatccatgttggaatttaatcgcggcctcgagcaagacgtttcccgttgaatatggctcataacaccccttgtattactgtttatgtaagcagacagttttattgttcatgatgatatatttttatcttgtgcaatgtaacatcagagattttgagacacaacgtggctttccccccccccccattattgaagcatttatcagggttattgtctcatgagcggatacatatttgaatgtatttagaaaaataaacaaataggggttccgcgcacatttccccgaaaagtgccacctgacgtctaagaaaccattattatcatgacattaacctataaaaataggcgtatcacgaggccctttcgtc

SEQ ID NO: 78 - DNA, 6120 bp, Artificial Sequence
  Plasmid DNA: 53346
tcgcgcgtttcggtgatgacggtgaaaacctctgacacatgcagctcccggagacggtcacagcttgtctgtaagcggatgccgggagcagacaagcccgtcagggcgcgtcagcgggtgttggcgggtgtcggggctggcttaactatgcggcatcagagcagattgtactgagagtgcaccatatgcggtgtgaaataccgcacagatgcgtaaggagaaaataccgcatcagattggctattggccattgcatacgttgtatccatatcataatatgtacatttatattggctcatgtccaacattaccgccatgttgacattgattattgactagttattaatagtaatcaattacgggaacttccatagcccatatatggagttccgcgttacataacttacgggaatttccaaacctggctgaccgcccaacgacccccgcccattgacgtcaataatgacgtatgttcccatagtaacgccaatagggaacttccattgacgtcaatgggtggagtatttacggtaaactgcccacttgggaatttccaagtgtatcatatgccaagtacgccccctattgacgtcaatgacgggaacttccataagcttgcattatgcccagtacatgaccttatgggaatttcctacttggcagtacatctacgtattagtcatcgctattaccatggtgatgcggttttggcagtacatcaatgggcgtggatagcggtttgactcacgggaacttccaagtctccaccccattgacgtcaatgggagtttgttttgactcaccaaaatcaacgggaatttccaaaatgtcgtaacaactccgccccattgacgcaaatgggcggtaggcgtgtacggtgggaggtctatataagcagagctcgtttagtgaaccgtcagatcgcctggagacgccatccacgctgttttgacctccatagaagacaccgggaccgatccagcctccatcggctcgcatctctccttcacgcgcccgccgccctacctgaggccgccatccacgccggttgagtcgcgttctgccgcctcccgcctgtggtgcctcctgaactgcgtccgccgtctaggtaagtttaaagctcaggtcgagaccgggcctttgtccggcgctcccttggagcctacctagactcagccggctctccacgctttgcctgaccctgcttgctcaactctagttaacggtggagggcagtgtagtctgagcagtactcgttgctgccgcgcgcgccaccagacataatagctgacagactaacagactgttcctttccatgggtcttttctgcagtcaccgtcgtcgacacgtgtgatcagatatcgcggccgctctagagatatcgccaccatgatcgccatcatcatcattaccatcctggccaccacaggcaagagcgacaagatctgtatcggctaccacgccaacaatagcaccacccaggtggacacaatcctggagaagaacgtgaccgtgacacactctgtggagctgctggagaaccagaaggaggagcggttctgtaaggtgctgaacagagcccctctggatctgaggagctgtacaatcgagggctggattctgggcaaccccagatgtgatctgctgctgggcgatcagtggtggagctacatcgtggagagacccacagcccagaatggcatctgttaccccggcgtgctgaatgatgtggaggagctgaaggccctgatcggcagcggagagaaggtggagagattcgagatgttccccaagtctacatgggccggagtggatacaaatagcggcgtgtccagcgcctgtccttacaccaccggcagcagcttctacagaaacctgctgtggatcatcaagacccgcagcagcgcctatcctgtgatcaggggcacctacaacaacaccggcaaccagcccatcctgtacttttggggcgtgcaccaccctccagataccaacgagcagaacaccctgtacggcagcggcgacagatatgtgagaatgggcaccgagaggatgaatttcgccaagggccctgaaattgccgccagacctgccgtgaatggccagagaggccggatcgattactactggagcgtgctgaagcctggcgagacactgaacgtggagagcaacggcaatctgatcgccccttggtacgcctacagattcgtgtccaccgatagaaagggcgccgtgttcaagagcaacctgcccatcgagaactgtgatgccacctgtcagacaattgccggggtgctgaggaccaataagaccttccagaacgtgtcccctctgtggatcggcgagtgccctaagtatgtgaagagcgagagcctgagactggccacaggcctgagaaacatcccccagagagagaccagaggactgtttggagccatcgccggattcatcgagggaggatggaccggaatgatcgatggctggtacggctaccaccacgagaatagccagggctctggatatgccgccgatagagagtctacccagaaggccatcgacggcatcaccaacaaggtgaacagcatcatcgacaagatgaacacccagttcgaggccgtggatcacgagttcagcaacctggagcggagaatcgacaacctgaacaagaggatggaggacggctttctggatgtgtggacctacaatgccgagctgctgatcctgctggaaaacgagaggaccctggacatgcacgacgccaacgtgaagaacctgtacgagaaggtgaagagccagctgagagacaacgccaacgatctgggcaatggctgcttcgagttctggcacaagtgtgacaacgactgtatcgagagcgtgaagaacggcacctataactaccccaagtaccaggccgagagcagactgaacaggcagaccatcgagagcggcagactggtgcctagaggatctcctggcagcggatatattcctgaggcccctagagatggacaggcctatgtgagaaaggatggcgaatgggtgctgctgtctacatttctgggacaccaccatcaccaccattgatgaacacgtgggatccagatctgctgtgccttctagttgccagccatctgttgtttgcccctcccccgtgccttccttgaccctggaaggtgccactcccactgtcctttcctaataaaatgaggaaattgcatcgcattgtctgagtaggtgtcattctattctggggggtggggtggggcaggacagcaagggggaggattgggaagacaatagcaggcatgctggggatgcggtgggctctatgggtacccaggtgctgaagaattgacccggttcctcctgggccagaaagaagcaggcacatccccttctctgtgacacaccctgtccacgcccctggttcttagttccagccccactcataggacactcatagctcaggagggctccgccttcaatcccacccgctaaagtacttggagcggtctctccctccctcatcagcccaccaaaccaaacctagcctccaagagtgggaagaaattaaagcaagataggctattaagtgcagagggagagaaaatgcctccaacatgtgaggaagtaatgagagaaatcatagaattttaaggccatgatttaaggccatcatggccttaatcttccgcttcctcgctcactgactcgctgcgctcggtcgttcggctgcggcgagcggtatcagctcactcaaaggcggtaatacggttatccacagaatcaggggataacgcaggaaagaacatgtgagcaaaaggccagcaaaaggccaggaaccgtaaaaaggccgcgttgctggcgtttttccataggctccgcccccctgacgagcatcacaaaaatcgacgctcaagtcagaggtggcgaaacccgacaggactataaagataccaggcgtttccccctggaagctccctcgtgcgctctcctgttccgaccctgccgcttaccggatacctgtccgcctttctcccttcgggaagcgtggcgctttctcatagctcacgctgtaggtatctcagttcggtgtaggtcgttcgctccaagctgggctgtgtgcacgaaccccccgttcagcccgaccgctgcgccttatccggtaactatcgtcttgagtccaacccggtaagacacgacttatcgccactggcagcagccactggtaacaggattagcagagcgaggtatgtaggcggtgctacagagttcttgaagtggtggcctaactacggctacactagaagaacagtatttggtatctgcgctctgctgaagccagttaccttcggaaaaagagttggtagctcttgatccggcaaacaaaccaccgctggtagcggtggtttttttgtttgcaagcagcagattacgcgcagaaaaaaaggatctcaagaagatcctttgatcttttctacggggtctgacgctcagtggaacgaaaactcacgttaagggattttggtcatgagattatcaaaaaggatcttcacctagatccttttaaattaaaaatgaagttttaaatcaatctaaagtatatatgagtaaacttggtctgacagttaccaatgcttaatcagtgaggcacctatctcagcgatctgtctatttcgttcatccatagttgcctgactcggggggggggggcgctgaggtctgcctcgtgaagaaggtgttgctgactcataccaggcctgaatcgccccatcatccagccagaaagtgagggagccacggttgatgagagctttgttgtaggtggaccagttggtgattttgaacttttgctttgccacggaacggtctgcgttgtcgggaagatgcgtgatctgatccttcaactcagcaaaagttcgatttattcaacaaagccgccgtcccgtcaagtcagcgtaatgctctgccagtgttacaaccaattaaccaattctgattagaaaaactcatcgagcatcaaatgaaactgcaatttattcatatcaggattatcaataccatatttttgaaaaagccgtttctgtaatgaaggagaaaactcaccgaggcagttccataggatggcaagatcctggtatcggtctgcgattccgactcgtccaacatcaatacaacctattaatttcccctcgtcaaaaataaggttatcaagtgagaaatcaccatgagtgacgactgaatccggtgagaatggcaaaagcttatgcatttctttccagacttgttcaacaggccagccattacgctcgtcatcaaaatcactcgcatcaaccaaaccgttattcattcgtgattgcgcctgagcgagacgaaatacgcgatcgctgttaaaaggacaattacaaacaggaatcgaatgcaaccggcgcaggaacactgccagcgcatcaacaatattttcacctgaatcaggatattcttctaatacctggaatgctgttttcccggggatcgcagtggtgagtaaccatgcatcatcaggagtacggataaaatgcttgatggtcggaagaggcataaattccgtcagccagtttagtctgaccatctcatctgtaacatcattggcaacgctacctttgccatgtttcagaaacaactctggcgcatcgggcttcccatacaatcgatagattgtcgcacctgattgcccgacattatcgcgagcccatttatacccatataaatcagcatccatgttggaatttaatcgcggcctcgagcaagacgtttcccgttgaatatggctcataacaccccttgtattactgtttatgtaagcagacagttttattgttcatgatgatatatttttatcttgtgcaatgtaacatcagagattttgagacacaacgtggctttccccccccccccattattgaagcatttatcagggttattgtctcatgagcggatacatatttgaatgtatttagaaaaataaacaaataggggttccgcgcacatttccccgaaaagtgccacctgacgtctaagaaaccattattatcatgacattaacctataaaaataggcgtatcacgaggccctttcgtc

SEQ ID NO: 79 - DNA, 6114 bp, Artificial Sequence
  Plasmid DNA: 53353
tcgcgcgtttcggtgatgacggtgaaaacctctgacacatgcagctcccggagacggtcacagcttgtctgtaagcggatgccgggagcagacaagcccgtcagggcgcgtcagcgggtgttggcgggtgtcggggctggcttaactatgcggcatcagagcagattgtactgagagtgcaccatatgcggtgtgaaataccgcacagatgcgtaaggagaaaataccgcatcagattggctattggccattgcatacgttgtatccatatcataatatgtacatttatattggctcatgtccaacattaccgccatgttgacattgattattgactagttattaatagtaatcaattacgggaacttccatagcccatatatggagttccgcgttacataacttacgggaatttccaaacctggctgaccgcccaacgacccccgcccattgacgtcaataatgacgtatgttcccatagtaacgccaatagggaacttccattgacgtcaatgggtggagtatttacggtaaactgcccacttgggaatttccaagtgtatcatatgccaagtacgccccctattgacgtcaatgacgggaacttccataagcttgcattatgcccagtacatgaccttatgggaatttcctacttggcagtacatctacgtattagtcatcgctattaccatggtgatgcggttttggcagtacatcaatgggcgtggatagcggtttgactcacgggaacttccaagtctccaccccattgacgtcaatgggagtttgttttgactcaccaaaatcaacgggaatttccaaaatgtcgtaacaactccgccccattgacgcaaatgggcggtaggcgtgtacggtgggaggtctatataagcagagctcgtttagtgaaccgtcagatcgcctggagacgccatccacgctgttttgacctccatagaagacaccgggaccgatccagcctccatcggctcgcatctctccttcacgcgcccgccgccctacctgaggccgccatccacgccggttgagtcgcgttctgccgcctcccgcctgtggtgcctcctgaactgcgtccgccgtctaggtaagtttaaagctcaggtcgagaccgggcctttgtccggcgctcccttggagcctacctagactcagccggctctccacgctttgcctgaccctgcttgctcaactctagttaacggtggagggcagtgtagtctgagcagtactcgttgctgccgcgcgcgccaccagacataatagctgacagactaacagactgttcctttccatgggtcttttctgcagtcaccgtcgtcgacacgtgtgatcagatatcgcggccgctctagagatatcgccaccatggccatcatctacctgatcctgctgtttacagctgtgagaggcgaccagatctgtatcggctaccacgccaacaatagcaccgagaaggtggacaccatcctggagagaaacgtgacagtgacccacgccaaggacatcctggaaaagacccacaacggcaagctgtgtaagctgaacggcatccctcctctggaactgggcgattgttctatcgccggatggctgctgggaaaccccgagtgtgataggctgctgtctgtgcctgagtggagctacatcatggagaaggagaaccctagggacggcctgtgttaccctggcagcttcaacgattacgaggagctgaagcacctgctgtctagcgtgaagcacttcgagaaggtgaagatcctgcccaaggacagatggacccagcacacaacaacaggaggaagcagagcctgcgccgtgtctggcaaccccagcttcttccggaatatggtgtggctgaccaagaagggcagcaattaccctgtggcccagggcagctacaataataccagcggcgagcagatgctgatcatctggggagtgcaccaccctaatgacgagaccgagcagagaaccctgtaccagaatgtgggcacctacgtgtctgtgggcaccagcaccctgaataagagaagcacccccgagattgccacaagacccaaggtgaacggccagggaggaagaatggagttcagctggaccctgctggatatgtgggacaccatcaactttgagagcaccggcaatctgatcgcccctgagtacggcttcaagatcagcaagagaggcagcagcggcatcatgaaaaccgagggcaccctggagaattgtgagaccaagtgccagacacctctgggcgccatcaataccaccctgcccttccacaatgtgcaccctctgaccatcggcgagtgccctaagtatgtgaagagcgagaagctggtgctggccacaggactgagaaacgtgccccagatcgagagcagaggcctgtttggagccatcgccggattcatcgagggaggatggcagggaatggtcgatggctggtacggctaccaccacagcaatgatcagggctctggctatgccgccgataaggagtctacccagaaggcctttgacggcatcaccaacaaggtgaacagcgtgatcgagaagatgaacacccagtttgaggctgtgggcaaggagtttagcaacctggagcggagactggagaacctgaacaagaagatggaggacggcttcctggatgtgtggacctacaatgccgaactgctggtgctgatggagaatgagcggaccctggacttccacgacagcaacgtgaagaacctgtacgacaaagtgaggatgcagctgagggacaacgtgaaggaactgggcaatggctgcttcgagttctaccacaagtgtgacgacgagtgtatgaactccgtgaagaacggcacctacgactaccctaagtacgaggaggagagcaagctgaaccggaacgagatcaagggcgtgaagctgtctagcatgggcgtgtatcagatcctggccatctatgccacagtggccggatctctgagcctggcaattatgatggctggaatcagcttctggatgtgctccaatggcagcctgcagtgccggatctgtatctgatgaacacgtgggatccagatctgctgtgccttctagttgccagccatctgttgtttgcccctcccccgtgccttccttgaccctggaaggtgccactcccactgtcctttcctaataaaatgaggaaattgcatcgcattgtctgagtaggtgtcattctattctggggggtggggtggggcaggacagcaagggggaggattgggaagacaatagcaggcatgctggggatgcggtgggctctatgggtacccaggtgctgaagaattgacccggttcctcctgggccagaaagaagcaggcacatccccttctctgtgacacaccctgtccacgcccctggttcttagttccagccccactcataggacactcatagctcaggagggctccgccttcaatcccacccgctaaagtacttggagcggtctctccctccctcatcagcccaccaaaccaaacctagcctccaagagtgggaagaaattaaagcaagataggctattaagtgcagagggagagaaaatgcctccaacatgtgaggaagtaatgagagaaatcatagaattttaaggccatgatttaaggccatcatggccttaatcttccgcttcctcgctcactgactcgctgcgctcggtcgttcggctgcggcgagcggtatcagctcactcaaaggcggtaatacggttatccacagaatcaggggataacgcaggaaagaacatgtgagcaaaaggccagcaaaaggccaggaaccgtaaaaaggccgcgttgctggcgtttttccataggctccgcccccctgacgagcatcacaaaaatcgacgctcaagtcagaggtggcgaaacccgacaggactataaagataccaggcgtttccccctggaagctccctcgtgcgctctcctgttccgaccctgccgcttaccggatacctgtccgcctttctcccttcgggaagcgtggcgctttctcatagctcacgctgtaggtatctcagttcggtgtaggtcgttcgctccaagctgggctgtgtgcacgaaccccccgttcagcccgaccgctgcgccttatccggtaactatcgtcttgagtccaacccggtaagacacgacttatcgccactggcagcagccactggtaacaggattagcagagcgaggtatgtaggcggtgctacagagttcttgaagtggtggcctaactacggctacactagaagaacagtatttggtatctgcgctctgctgaagccagttaccttcggaaaaagagttggtagctcttgatccggcaaacaaaccaccgctggtagcggtggtttttttgtttgcaagcagcagattacgcgcagaaaaaaaggatctcaagaagatcctttgatcttttctacggggtctgacgctcagtggaacgaaaactcacgttaagggattttggtcatgagattatcaaaaaggatcttcacctagatccttttaaattaaaaatgaagttttaaatcaatctaaagtatatatgagtaaacttggtctgacagttaccaatgcttaatcagtgaggcacctatctcagcgatctgtctatttcgttcatccatagttgcctgactcggggggggggggcgctgaggtctgcctcgtgaagaaggtgttgctgactcataccaggcctgaatcgccccatcatccagccagaaagtgagggagccacggttgatgagagctttgttgtaggtggaccagttggtgattttgaacttttgctttgccacggaacggtctgcgttgtcgggaagatgcgtgatctgatccttcaactcagcaaaagttcgatttattcaacaaagccgccgtcccgtcaagtcagcgtaatgctctgccagtgttacaaccaattaaccaattctgattagaaaaactcatcgagcatcaaatgaaactgcaatttattcatatcaggattatcaataccatatttttgaaaaagccgtttctgtaatgaaggagaaaactcaccgaggcagttccataggatggcaagatcctggtatcggtctgcgattccgactcgtccaacatcaatacaacctattaatttcccctcgtcaaaaataaggttatcaagtgagaaatcaccatgagtgacgactgaatccggtgagaatggcaaaagcttatgcatttctttccagacttgttcaacaggccagccattacgctcgtcatcaaaatcactcgcatcaaccaaaccgttattcattcgtgattgcgcctgagcgagacgaaatacgcgatcgctgttaaaaggacaattacaaacaggaatcgaatgcaaccggcgcaggaacactgccagcgcatcaacaatattttcacctgaatcaggatattcttctaatacctggaatgctgttttcccggggatcgcagtggtgagtaaccatgcatcatcaggagtacggataaaatgcttgatggtcggaagaggcataaattccgtcagccagtttagtctgaccatctcatctgtaacatcattggcaacgctacctttgccatgtttcagaaacaactctggcgcatcgggcttcccatacaatcgatagattgtcgcacctgattgcccgacattatcgcgagcccatttatacccatataaatcagcatccatgttggaatttaatcgcggcctcgagcaagacgtttcccgttgaatatggctcataacaccccttgtattactgtttatgtaagcagacagttttattgttcatgatgatatatttttatcttgtgcaatgtaacatcagagattttgagacacaacgtggctttccccccccccccattattgaagcatttatcagggttattgtctcatgagcggatacatatttgaatgtatttagaaaaataaacaaataggggttccgcgcacatttccccgaaaagtgccacctgacgtctaagaaaccattattatcatgacattaacctataaaaataggcgtatcacgaggccctttcgtc

SEQ ID NO: 80 - DNA, 6108 bp, Artificial Sequence
  Plasmid DNA: 53355
tcgcgcgtttcggtgatgacggtgaaaacctctgacacatgcagctcccggagacggtcacagcttgtctgtaagcggatgccgggagcagacaagcccgtcagggcgcgtcagcgggtgttggcgggtgtcggggctggcttaactatgcggcatcagagcagattgtactgagagtgcaccatatgcggtgtgaaataccgcacagatgcgtaaggagaaaataccgcatcagattggctattggccattgcatacgttgtatccatatcataatatgtacatttatattggctcatgtccaacattaccgccatgttgacattgattattgactagttattaatagtaatcaattacgggaacttccatagcccatatatggagttccgcgttacataacttacgggaatttccaaacctggctgaccgcccaacgacccccgcccattgacgtcaataatgacgtatgttcccatagtaacgccaatagggaacttccattgacgtcaatgggtggagtatttacggtaaactgcccacttgggaatttccaagtgtatcatatgccaagtacgccccctattgacgtcaatgacgggaacttccataagcttgcattatgcccagtacatgaccttatgggaatttcctacttggcagtacatctacgtattagtcatcgctattaccatggtgatgcggttttggcagtacatcaatgggcgtggatagcggtttgactcacgggaacttccaagtctccaccccattgacgtcaatgggagtttgttttgactcaccaaaatcaacgggaatttccaaaatgtcgtaacaactccgccccattgacgcaaatgggcggtaggcgtgtacggtgggaggtctatataagcagagctcgtttagtgaaccgtcagatcgcctggagacgccatccacgctgttttgacctccatagaagacaccgggaccgatccagcctccatcggctcgcatctctccttcacgcgcccgccgccctacctgaggccgccatccacgccggttgagtcgcgttctgccgcctcccgcctgtggtgcctcctgaactgcgtccgccgtctaggtaagtttaaagctcaggtcgagaccgggcctttgtccggcgctcccttggagcctacctagactcagccggctctccacgctttgcctgaccctgcttgctcaactctagttaacggtggagggcagtgtagtctgagcagtactcgttgctgccgcgcgcgccaccagacataatagctgacagactaacagactgttcctttccatgggtcttttctgcagtcaccgtcgtcgacacgtgtgatcagatatcgcggccgctctagagatatcgccaccatggccatcatctacctgatcctgctgtttacagctgtgagaggcgaccagatctgtatcggctaccacgccaacaatagcaccgagaaggtggacaccatcctggagagaaacgtgacagtgacccacgccaaggacatcctggaaaagacccacaacggcaagctgtgtaagctgaacggcatccctcctctggaactgggcgattgttctatcgccggatggctgctgggaaaccccgagtgtgataggctgctgtctgtgcctgagtggagctacatcatggagaaggagaaccctagggacggcctgtgttaccctggcagcttcaacgattacgaggagctgaagcacctgctgtctagcgtgaagcacttcgagaaggtgaagatcctgcccaaggacagatggacccagcacacaacaacaggaggaagcagagcctgcgccgtgtctggcaaccccagcttcttccggaatatggtgtggctgaccaagaagggcagcaattaccctgtggcccagggcagctacaataataccagcggcgagcagatgctgatcatctggggagtgcaccaccctaatgacgagaccgagcagagaaccctgtaccagaatgtgggcacctacgtgtctgtgggcaccagcaccctgaataagagaagcacccccgagattgccacaagacccaaggtgaacggccagggaggaagaatggagttcagctggaccctgctggatatgtgggacaccatcaactttgagagcaccggcaatctgatcgcccctgagtacggcttcaagatcagcaagagaggcagcagcggcatcatgaaaaccgagggcaccctggagaattgtgagaccaagtgccagacacctctgggcgccatcaataccaccctgcccttccacaatgtgcaccctctgaccatcggcgagtgccctaagtatgtgaagagcgagaagctggtgctggccacaggactgagaaacgtgccccagagagagacaagaggcctgtttggagccatcgccggattcatcgagggaggatggcagggaatggtcgatggctggtacggctaccaccacagcaatgatcagggctctggctatgccgccgataaggagtctacccagaaggcctttgacggcatcaccaacaaggtgaacagcgtgatcgagaagatgaacacccagtttgaggctgtgggcaaggagtttagcaacctggagcggagactggagaacctgaacaagaagatggaggacggcttcctggatgtgtggacctacaatgccgaactgctggtgctgatggagaatgagcggaccctggacttccacgacagcaacgtgaagaacctgtacgacaaagtgaggatgcagctgagggacaacgtgaaggaactgggcaatggctgcttcgagttctaccacaagtgtgacgacgagtgtatgaactccgtgaagaacggcacctacgactaccctaagtacgaggaggagagcaagctgaaccggaacgagatcaagagcggcagactggtgcctagaggatctcctggcagcggatatattcctgaggcccctagagatggacaggcctatgtgagaaaggatggcgaatgggtgctgctgtctacatttctgggacaccaccatcaccaccattgatgaacacgtgggatccagatctgctgtgccttctagttgccagccatctgttgtttgcccctcccccgtgccttccttgaccctggaaggtgccactcccactgtcctttcctaataaaatgaggaaattgcatcgcattgtctgagtaggtgtcattctattctggggggtggggtggggcaggacagcaagggggaggattgggaagacaatagcaggcatgctggggatgcggtgggctctatgggtacccaggtgctgaagaattgacccggttcctcctgggccagaaagaagcaggcacatccccttctctgtgacacaccctgtccacgcccctggttcttagttccagccccactcataggacactcatagctcaggagggctccgccttcaatcccacccgctaaagtacttggagcggtctctccctccctcatcagcccaccaaaccaaacctagcctccaagagtgggaagaaattaaagcaagataggctattaagtgcagagggagagaaaatgcctccaacatgtgaggaagtaatgagagaaatcatagaattttaaggccatgatttaaggccatcatggccttaatcttccgcttcctcgctcactgactcgctgcgctcggtcgttcggctgcggcgagcggtatcagctcactcaaaggcggtaatacggttatccacagaatcaggggataacgcaggaaagaacatgtgagcaaaaggccagcaaaaggccaggaaccgtaaaaaggccgcgttgctggcgtttttccataggctccgcccccctgacgagcatcacaaaaatcgacgctcaagtcagaggtggcgaaacccgacaggactataaagataccaggcgtttccccctggaagctccctcgtgcgctctcctgttccgaccctgccgcttaccggatacctgtccgcctttctcccttcgggaagcgtggcgctttctcatagctcacgctgtaggtatctcagttcggtgtaggtcgttcgctccaagctgggctgtgtgcacgaaccccccgttcagcccgaccgctgcgccttatccggtaactatcgtcttgagtccaacccggtaagacacgacttatcgccactggcagcagccactggtaacaggattagcagagcgaggtatgtaggcggtgctacagagttcttgaagtggtggcctaactacggctacactagaagaacagtatttggtatctgcgctctgctgaagccagttaccttcggaaaaagagttggtagctcttgatccggcaaacaaaccaccgctggtagcggtggtttttttgtttgcaagcagcagattacgcgcagaaaaaaaggatctcaagaagatcctttgatcttttctacggggtctgacgctcagtggaacgaaaactcacgttaagggattttggtcatgagattatcaaaaaggatcttcacctagatccttttaaattaaaaatgaagttttaaatcaatctaaagtatatatgagtaaacttggtctgacagttaccaatgcttaatcagtgaggcacctatctcagcgatctgtctatttcgttcatccatagttgcctgactcggggggggggggcgctgaggtctgcctcgtgaagaaggtgttgctgactcataccaggcctgaatcgccccatcatccagccagaaagtgagggagccacggttgatgagagctttgttgtaggtggaccagttggtgattttgaacttttgctttgccacggaacggtctgcgttgtcgggaagatgcgtgatctgatccttcaactcagcaaaagttcgatttattcaacaaagccgccgtcccgtcaagtcagcgtaatgctctgccagtgttacaaccaattaaccaattctgattagaaaaactcatcgagcatcaaatgaaactgcaatttattcatatcaggattatcaataccatatttttgaaaaagccgtttctgtaatgaaggagaaaactcaccgaggcagttccataggatggcaagatcctggtatcggtctgcgattccgactcgtccaacatcaatacaacctattaatttcccctcgtcaaaaataaggttatcaagtgagaaatcaccatgagtgacgactgaatccggtgagaatggcaaaagcttatgcatttctttccagacttgttcaacaggccagccattacgctcgtcatcaaaatcactcgcatcaaccaaaccgttattcattcgtgattgcgcctgagcgagacgaaatacgcgatcgctgttaaaaggacaattacaaacaggaatcgaatgcaaccggcgcaggaacactgccagcgcatcaacaatattttcacctgaatcaggatattcttctaatacctggaatgctgttttcccggggatcgcagtggtgagtaaccatgcatcatcaggagtacggataaaatgcttgatggtcggaagaggcataaattccgtcagccagtttagtctgaccatctcatctgtaacatcattggcaacgctacctttgccatgtttcagaaacaactctggcgcatcgggcttcccatacaatcgatagattgtcgcacctgattgcccgacattatcgcgagcccatttatacccatataaatcagcatccatgttggaatttaatcgcggcctcgagcaagacgtttcccgttgaatatggctcataacaccccttgtattactgtttatgtaagcagacagttttattgttcatgatgatatatttttatcttgtgcaatgtaacatcagagattttgagacacaacgtggctttccccccccccccattattgaagcatttatcagggttattgtctcatgagcggatacatatttgaatgtatttagaaaaataaacaaataggggttccgcgcacatttccccgaaaagtgccacctgacgtctaagaaaccattattatcatgacattaacctataaaaataggcgtatcacgaggccctttcgtc

SEQ ID NO: 81 - DNA, 6123 bp, Artificial Sequence
  Plasmid DNA: 53356
tcgcgcgtttcggtgatgacggtgaaaacctctgacacatgcagctcccggagacggtcacagcttgtctgtaagcggatgccgggagcagacaagcccgtcagggcgcgtcagcgggtgttggcgggtgtcggggctggcttaactatgcggcatcagagcagattgtactgagagtgcaccatatgcggtgtgaaataccgcacagatgcgtaaggagaaaataccgcatcagattggctattggccattgcatacgttgtatccatatcataatatgtacatttatattggctcatgtccaacattaccgccatgttgacattgattattgactagttattaatagtaatcaattacgggaacttccatagcccatatatggagttccgcgttacataacttacgggaatttccaaacctggctgaccgcccaacgacccccgcccattgacgtcaataatgacgtatgttcccatagtaacgccaatagggaacttccattgacgtcaatgggtggagtatttacggtaaactgcccacttgggaatttccaagtgtatcatatgccaagtacgccccctattgacgtcaatgacgggaacttccataagcttgcattatgcccagtacatgaccttatgggaatttcctacttggcagtacatctacgtattagtcatcgctattaccatggtgatgcggttttggcagtacatcaatgggcgtggatagcggtttgactcacgggaacttccaagtctccaccccattgacgtcaatgggagtttgttttgactcaccaaaatcaacgggaatttccaaaatgtcgtaacaactccgccccattgacgcaaatgggcggtaggcgtgtacggtgggaggtctatataagcagagctcgtttagtgaaccgtcagatcgcctggagacgccatccacgctgttttgacctccatagaagacaccgggaccgatccagcctccatcggctcgcatctctccttcacgcgcccgccgccctacctgaggccgccatccacgccggttgagtcgcgttctgccgcctcccgcctgtggtgcctcctgaactgcgtccgccgtctaggtaagtttaaagctcaggtcgagaccgggcctttgtccggcgctcccttggagcctacctagactcagccggctctccacgctttgcctgaccctgcttgctcaactctagttaacggtggagggcagtgtagtctgagcagtactcgttgctgccgcgcgcgccaccagacataatagctgacagactaacagactgttcctttccatgggtcttttctgcagtcaccgtcgtcgacacgtgtgatcagatatcgcggccgctctagagatatcgccaccatggagaaaaccctgctgttcgccaccatctttctgtgtgtgaaggccgacgagatctgtatcggctacctgagcaacaacagcaccgacaaggtggacaccatcatcgagaacaacgtgaccgtgacaagctctgtggaactggtggagacagagcacaccggcagcttttgtagcatcaacggcaagcagcctatctctctgggcgattgctctttcgccggatggattctgggcaaccccatgtgtgatgacctgatcggcaagaccagctggagctacatcgtggagaagcccaaccctaccaacggcatctgttaccctggcatcctggagaatgaggaggagctgaggctgaagtttagcggcgtgctggagttcaataagttcgaggccttcaccagcaatggatggggagccgtgaattctggagccggagtgacagccgcctgtaagttcggcagcagcaacagcttcttccggaacatgatctggctgatccaccagagcggcacataccccgtgatcaagcggaccttcaacaacaccaagggcagggatgtgctggtggtgtggggaattcaccaccctgccaccctgaaagaacaccaggacctgtacaaaaaggacagcagctatgtggctgtgggcagcgagacctacaacaggagattcacccccgagatcagcacaagacccaaggtgaacggacaggccggaaggatgaccttctactggaccatcgtgaagcctggcgagagcatcaccttcgagagcaatggagcctttctggcccctagatacgccttcgagatcgtgtctgtgggcaatggcaagctgttccggagcgagctgaatatcgagagctgctccaccaagtgtcagacagaagtgggcggcatcaacaccaacaagagcttccacagcgtgcacagaaacaccatcggcgactgccccaagtacgtgaacgtgaagagcctgaagctggccacaggcctgagaaatgtgcccgccatcgccagcagaggactgtttggagccatcgccggattcatcgaaggaggatggcctggcctgatcaatggctggtacggcttccagcacagaaatgaggagggcacaggcattgccgccgataaggagtctacccagaaggccatcgaccagatcaccagcaaggtgaacaacatcgtggaccggatgaacaccaacttcgagagcgtgcagcacgagtttagcgagatcgaggagcggatcaacagactgagcaagcatgtggacgatagcgtggtggacatctggagctataacgcccagctgctggtgctgctggagaacgaaaagaccctggacctgcacgacagcaatgtgaggaacctgcacgagcgcgtgaggagaatgctgaaggacaacgccaaggatgagggcaatggctgcttcaccttctaccacaagtgtgacaacgagtgtatcgagaaagtgaggaacggcacctacgaccacaaggagttcgagaaggagagcaagatcaaccggcaggagatcgagggagtcaagctggatagcagcggcaacgtgtacaagatcctgagcatctacagctgtatcgccagctctctggtgctggccgccctgatcatgggctttatcctgtgggcctgtagcaatggctcctgccggtgtaccatctgtatctgatgaacacgtgggatccagatctgctgtgccttctagttgccagccatctgttgtttgcccctcccccgtgccttccttgaccctggaaggtgccactcccactgtcctttcctaataaaatgaggaaattgcatcgcattgtctgagtaggtgtcattctattctggggggtggggtggggcaggacagcaagggggaggattgggaagacaatagcaggcatgctggggatgcggtgggctctatgggtacccaggtgctgaagaattgacccggttcctcctgggccagaaagaagcaggcacatccccttctctgtgacacaccctgtccacgcccctggttcttagttccagccccactcataggacactcatagctcaggagggctccgccttcaatcccacccgctaaagtacttggagcggtctctccctccctcatcagcccaccaaaccaaacctagcctccaagagtgggaagaaattaaagcaagataggctattaagtgcagagggagagaaaatgcctccaacatgtgaggaagtaatgagagaaatcatagaattttaaggccatgatttaaggccatcatggccttaatcttccgcttcctcgctcactgactcgctgcgctcggtcgttcggctgcggcgagcggtatcagctcactcaaaggcggtaatacggttatccacagaatcaggggataacgcaggaaagaacatgtgagcaaaaggccagcaaaaggccaggaaccgtaaaaaggccgcgttgctggcgtttttccataggctccgcccccctgacgagcatcacaaaaatcgacgctcaagtcagaggtggcgaaacccgacaggactataaagataccaggcgtttccccctggaagctccctcgtgcgctctcctgttccgaccctgccgcttaccggatacctgtccgcctttctcccttcgggaagcgtggcgctttctcatagctcacgctgtaggtatctcagttcggtgtaggtcgttcgctccaagctgggctgtgtgcacgaaccccccgttcagcccgaccgctgcgccttatccggtaactatcgtcttgagtccaacccggtaagacacgacttatcgccactggcagcagccactggtaacaggattagcagagcgaggtatgtaggcggtgctacagagttcttgaagtggtggcctaactacggctacactagaagaacagtatttggtatctgcgctctgctgaagccagttaccttcggaaaaagagttggtagctcttgatccggcaaacaaaccaccgctggtagcggtggtttttttgtttgcaagcagcagattacgcgcagaaaaaaaggatctcaagaagatcctttgatcttttctacggggtctgacgctcagtggaacgaaaactcacgttaagggattttggtcatgagattatcaaaaaggatcttcacctagatccttttaaattaaaaatgaagttttaaatcaatctaaagtatatatgagtaaacttggtctgacagttaccaatgcttaatcagtgaggcacctatctcagcgatctgtctatttcgttcatccatagttgcctgactcggggggggggggcgctgaggtctgcctcgtgaagaaggtgttgctgactcataccaggcctgaatcgccccatcatccagccagaaagtgagggagccacggttgatgagagctttgttgtaggtggaccagttggtgattttgaacttttgctttgccacggaacggtctgcgttgtcgggaagatgcgtgatctgatccttcaactcagcaaaagttcgatttattcaacaaagccgccgtcccgtcaagtcagcgtaatgctctgccagtgttacaaccaattaaccaattctgattagaaaaactcatcgagcatcaaatgaaactgcaatttattcatatcaggattatcaataccatatttttgaaaaagccgtttctgtaatgaaggagaaaactcaccgaggcagttccataggatggcaagatcctggtatcggtctgcgattccgactcgtccaacatcaatacaacctattaatttcccctcgtcaaaaataaggttatcaagtgagaaatcaccatgagtgacgactgaatccggtgagaatggcaaaagcttatgcatttctttccagacttgttcaacaggccagccattacgctcgtcatcaaaatcactcgcatcaaccaaaccgttattcattcgtgattgcgcctgagcgagacgaaatacgcgatcgctgttaaaaggacaattacaaacaggaatcgaatgcaaccggcgcaggaacactgccagcgcatcaacaatattttcacctgaatcaggatattcttctaatacctggaatgctgttttcccggggatcgcagtggtgagtaaccatgcatcatcaggagtacggataaaatgcttgatggtcggaagaggcataaattccgtcagccagtttagtctgaccatctcatctgtaacatcattggcaacgctacctttgccatgtttcagaaacaactctggcgcatcgggcttcccatacaatcgatagattgtcgcacctgattgcccgacattatcgcgagcccatttatacccatataaatcagcatccatgttggaatttaatcgcggcctcgagcaagacgtttcccgttgaatatggctcataacaccccttgtattactgtttatgtaagcagacagttttattgttcatgatgatatatttttatcttgtgcaatgtaacatcagagattttgagacacaacgtggctttccccccccccccattattgaagcatttatcagggttattgtctcatgagcggatacatatttgaatgtatttagaaaaataaacaaataggggttccgcgcacatttccccgaaaagtgccacctgacgtctaagaaaccattattatcatgacattaacctataaaaataggcgtatcacgaggccctttcgtc

SEQ ID NO: 82 - DNA, 6114 bp, Artificial Sequence
  Plasmid DNA: 53358
tcgcgcgtttcggtgatgacggtgaaaacctctgacacatgcagctcccggagacggtcacagcttgtctgtaagcggatgccgggagcagacaagcccgtcagggcgcgtcagcgggtgttggcgggtgtcggggctggcttaactatgcggcatcagagcagattgtactgagagtgcaccatatgcggtgtgaaataccgcacagatgcgtaaggagaaaataccgcatcagattggctattggccattgcatacgttgtatccatatcataatatgtacatttatattggctcatgtccaacattaccgccatgttgacattgattattgactagttattaatagtaatcaattacgggaacttccatagcccatatatggagttccgcgttacataacttacgggaatttccaaacctggctgaccgcccaacgacccccgcccattgacgtcaataatgacgtatgttcccatagtaacgccaatagggaacttccattgacgtcaatgggtggagtatttacggtaaactgcccacttgggaatttccaagtgtatcatatgccaagtacgccccctattgacgtcaatgacgggaacttccataagcttgcattatgcccagtacatgaccttatgggaatttcctacttggcagtacatctacgtattagtcatcgctattaccatggtgatgcggttttggcagtacatcaatgggcgtggatagcggtttgactcacgggaacttccaagtctccaccccattgacgtcaatgggagtttgttttgactcaccaaaatcaacgggaatttccaaaatgtcgtaacaactccgccccattgacgcaaatgggcggtaggcgtgtacggtgggaggtctatataagcagagctcgtttagtgaaccgtcagatcgcctggagacgccatccacgctgttttgacctccatagaagacaccgggaccgatccagcctccatcggctcgcatctctccttcacgcgcccgccgccctacctgaggccgccatccacgccggttgagtcgcgttctgccgcctcccgcctgtggtgcctcctgaactgcgtccgccgtctaggtaagtttaaagctcaggtcgagaccgggcctttgtccggcgctcccttggagcctacctagactcagccggctctccacgctttgcctgaccctgcttgctcaactctagttaacggtggagggcagtgtagtctgagcagtactcgttgctgccgcgcgcgccaccagacataatagctgacagactaacagactgttcctttccatgggtcttttctgcagtcaccgtcgtcgacacgtgtgatcagatatcgcggccgctctagagatatcgccaccatggagaaaaccctgctgttcgccaccatctttctgtgtgtgaaggccgacgagatctgtatcggctacctgagcaacaacagcaccgacaaggtggacaccatcatcgagaacaacgtgaccgtgacaagctctgtggaactggtggagacagagcacaccggcagcttttgtagcatcaacggcaagcagcctatctctctgggcgattgctctttcgccggatggattctgggcaaccccatgtgtgatgacctgatcggcaagaccagctggagctacatcgtggagaagcccaaccctaccaacggcatctgttaccctggcatcctggagaatgaggaggagctgaggctgaagtttagcggcgtgctggagttcaataagttcgaggccttcaccagcaatggatggggagccgtgaattctggagccggagtgacagccgcctgtaagttcggcagcagcaacagcttcttccggaacatgatctggctgatccaccagagcggcacataccccgtgatcaagcggaccttcaacaacaccaagggcagggatgtgctggtggtgtggggaattcaccaccctgccaccctgaaagaacaccaggacctgtacaaaaaggacagcagctatgtggctgtgggcagcgagacctacaacaggagattcacccccgagatcagcacaagacccaaggtgaacggacaggccggaaggatgaccttctactggaccatcgtgaagcctggcgagagcatcaccttcgagagcaatggagcctttctggcccctagatacgccttcgagatcgtgtctgtgggcaatggcaagctgttccggagcgagctgaatatcgagagctgctccaccaagtgtcagacagaagtgggcggcatcaacaccaacaagagcttccacagcgtgcacagaaacaccatcggcgactgccccaagtacgtgaacgtgaagagcctgaagctggccacaggcctgagaaatgtgccccagagagagaccagaggactgtttggagccatcgccggattcatcgaaggaggatggcctggcctgatcaatggctggtacggcttccagcacagaaatgaggagggcacaggcattgccgccgataaggagtctacccagaaggccatcgaccagatcaccagcaaggtgaacaacatcgtggaccggatgaacaccaacttcgagagcgtgcagcacgagtttagcgagatcgaggagcggatcaacagactgagcaagcatgtggacgatagcgtggtggacatctggagctataacgcccagctgctggtgctgctggagaacgaaaagaccctggacctgcacgacagcaatgtgaggaacctgcacgagcgcgtgaggagaatgctgaaggacaacgccaaggatgagggcaatggctgcttcaccttctaccacaagtgtgacaacgagtgtatcgagaaagtgaggaacggcacctacgaccacaaggagttcgagaaggagagcaagatcaaccggcaggagatcgagagcggcagactggtgcctagaggatctcctggcagcggatatattcctgaggcccctagagatggacaggcctatgtgagaaaggatggcgaatgggtgctgctgtctacatttctgggacaccaccatcaccaccattgatgaacacgtgggatccagatctgctgtgccttctagttgccagccatctgttgtttgcccctcccccgtgccttccttgaccctggaaggtgccactcccactgtcctttcctaataaaatgaggaaattgcatcgcattgtctgagtaggtgtcattctattctggggggtggggtggggcaggacagcaagggggaggattgggaagacaatagcaggcatgctggggatgcggtgggctctatgggtacccaggtgctgaagaattgacccggttcctcctgggccagaaagaagcaggcacatccccttctctgtgacacaccctgtccacgcccctggttcttagttccagccccactcataggacactcatagctcaggagggctccgccttcaatcccacccgctaaagtacttggagcggtctctccctccctcatcagcccaccaaaccaaacctagcctccaagagtgggaagaaattaaagcaagataggctattaagtgcagagggagagaaaatgcctccaacatgtgaggaagtaatgagagaaatcatagaattttaaggccatgatttaaggccatcatggccttaatcttccgcttcctcgctcactgactcgctgcgctcggtcgttcggctgcggcgagcggtatcagctcactcaaaggcggtaatacggttatccacagaatcaggggataacgcaggaaagaacatgtgagcaaaaggccagcaaaaggccaggaaccgtaaaaaggccgcgttgctggcgtttttccataggctccgcccccctgacgagcatcacaaaaatcgacgctcaagtcagaggtggcgaaacccgacaggactataaagataccaggcgtttccccctggaagctccctcgtgcgctctcctgttccgaccctgccgcttaccggatacctgtccgcctttctcccttcgggaagcgtggcgctttctcatagctcacgctgtaggtatctcagttcggtgtaggtcgttcgctccaagctgggctgtgtgcacgaaccccccgttcagcccgaccgctgcgccttatccggtaactatcgtcttgagtccaacccggtaagacacgacttatcgccactggcagcagccactggtaacaggattagcagagcgaggtatgtaggcggtgctacagagttcttgaagtggtggcctaactacggctacactagaagaacagtatttggtatctgcgctctgctgaagccagttaccttcggaaaaagagttggtagctcttgatccggcaaacaaaccaccgctggtagcggtggtttttttgtttgcaagcagcagattacgcgcagaaaaaaaggatctcaagaagatcctttgatcttttctacggggtctgacgctcagtggaacgaaaactcacgttaagggattttggtcatgagattatcaaaaaggatcttcacctagatccttttaaattaaaaatgaagttttaaatcaatctaaagtatatatgagtaaacttggtctgacagttaccaatgcttaatcagtgaggcacctatctcagcgatctgtctatttcgttcatccatagttgcctgactcggggggggggggcgctgaggtctgcctcgtgaagaaggtgttgctgactcataccaggcctgaatcgccccatcatccagccagaaagtgagggagccacggttgatgagagctttgttgtaggtggaccagttggtgattttgaacttttgctttgccacggaacggtctgcgttgtcgggaagatgcgtgatctgatccttcaactcagcaaaagttcgatttattcaacaaagccgccgtcccgtcaagtcagcgtaatgctctgccagtgttacaaccaattaaccaattctgattagaaaaactcatcgagcatcaaatgaaactgcaatttattcatatcaggattatcaataccatatttttgaaaaagccgtttctgtaatgaaggagaaaactcaccgaggcagttccataggatggcaagatcctggtatcggtctgcgattccgactcgtccaacatcaatacaacctattaatttcccctcgtcaaaaataaggttatcaagtgagaaatcaccatgagtgacgactgaatccggtgagaatggcaaaagcttatgcatttctttccagacttgttcaacaggccagccattacgctcgtcatcaaaatcactcgcatcaaccaaaccgttattcattcgtgattgcgcctgagcgagacgaaatacgcgatcgctgttaaaaggacaattacaaacaggaatcgaatgcaaccggcgcaggaacactgccagcgcatcaacaatattttcacctgaatcaggatattcttctaatacctggaatgctgttttcccggggatcgcagtggtgagtaaccatgcatcatcaggagtacggataaaatgcttgatggtcggaagaggcataaattccgtcagccagtttagtctgaccatctcatctgtaacatcattggcaacgctacctttgccatgtttcagaaacaactctggcgcatcgggcttcccatacaatcgatagattgtcgcacctgattgcccgacattatcgcgagcccatttatacccatataaatcagcatccatgttggaatttaatcgcggcctcgagcaagacgtttcccgttgaatatggctcataacaccccttgtattactgtttatgtaagcagacagttttattgttcatgatgatatatttttatcttgtgcaatgtaacatcagagattttgagacacaacgtggctttccccccccccccattattgaagcatttatcagggttattgtctcatgagcggatacatatttgaatgtatttagaaaaataaacaaataggggttccgcgcacatttccccgaaaagtgccacctgacgtctaagaaaccattattatcatgacattaacctataaaaataggcgtatcacgaggccctttcgtc

SEQ ID NO: 83 - DNA, 11368 bp, Artificial Sequence
  Plasmid DNA: 53501
aagctttactcgtaaagcgagttgaaggatcatatttagttgcgtttatgagataagattgaaagcacgtgtaaaatgtttcccgcgcgttggcacaactatttacaatgcggccaagttataaaagattctaatctgatatgttttaaaacacctttgcggcccgagttgtttgcgtacgtgactagcgaagaagatgtgtggaccgcagaacagatagtaaaacaaaaccctagtattggagcaataatcgatttaaccaacacgtctaaatattatgatggtgtgcattttttgcgggcgggcctgttatacaaaaaaattcaagtacctggccagactttgccgcctgaaagcatagttcaagaatttattgacacggtaaaagaatttacagaaaagtgtcccggcatgttggtgggcgtgcactgcacacacggtattaatcgcaccggttacatggtgtgcagatatttaatgcacaccctgggtattgcgccgcaggaagccatagatagattcgaaaaagccagaggtcacaaaattgaaagacaaaattacgttcaagatttattaatttaattaatattatttgcattctttaacaaatactttatcctattttcaaattgttgcgcttcttccagcgaaccaaaactatgcttcgcttgctccgtttagcttgtagccgatcagtggcgttgttccaatcgacggtaggattaggccggatattctccaccacaatgttggcaacgttgatgttacgtttatgcttttggttttccacgtacgtcttttggccggtaatagccgtaaacgtagtgccgtcgcgcgtcacgcacaacaccggatgtttgcgcttgtccgcggggtattgaaccgcgcgatccgacaaatccaccactttggcaactaaatcggtgacctgcgcgtcttttttctgcattatttcgtctttcttttgcatggtttcctggaagccggtgtacatgcggtttagatcagtcatgacgcgcgtgacctgcaaatctttggcctcgatctgcttgtccttgatggcaacgatgcgttcaataaactcttgttttttaacaagttcctcggttttttgcgccaccaccgcttgcagcgcgtttgtgtgctcggtgaatgtcgcaatcagcttagtcaccaactgtttgctctcctcctcccgttgtttgatcgcgggatcgtacttgccggtgcagagcacttgaggaattacttcttctaaaagccattcttgtaattctatggcgtaaggcaatttggacttcataatcagctgaatcacgccggatttagtaatgagcactgtatgcggctgcaaatacagcgggtcgccccttttcacgacgctgttagaggtagggcccccattttggatggtctgctcaaataacgatttgtatttattgtctacatgaacacgtatagctttatcacaaactgtatattttaaactgttagcgacgtccttggccacgaaccggacctgttggtcgcgctctagcacgtaccgcaggttgaacgtatcttctccaaatttaaattctccaattttaacgcgagccattttgatacacgtgtgtcgattttgcaacaactattgttttttaacgcaaactaaacttattgtggtaagcaataattaaatatgggggaacatgcgccgctacaacactcgtcgttatgaacgcagacggcgccggtctcggcgcaagcggctaaaacgtgttgcgcgttcaacgcggcaaacatcgcaaaagccaatagtacagttttgatttgcatattaacggcgattttttaaattatcttatttaataaatagttatgacgcctacaactccccgcccgcgttgactcgctgcacctcgagcagttcgttgacgccttcctccgtgtggccgaacacgtcgagcgggtggtcgatgaccagcggcgtgccgcacgcgacgcacaagtatctgtacaccgaatgatcgtcgggcgaaggcacgtcggcctccaagtggcaatattggcaaattcgaaaatatatacagttgggttgtttgcgcatatctatcgtggcgttgggcatgtacgtccgaacgttgatttgcatgcaagccgaaattaaatcattgcgattagtgcgattaaaacgttgtacatcctcgcttttaatcatgccgtcgattaaatcgcgcaatcgagtcaagtgatcaaagtgtggaataatgttttctttgtattcccgagtcaagcgcagcgcgtattttaacaaactagccatcttgtaagttagtttcatttaatgcaactttatccaataatatattatgtatcgcacgtcaagaattaacaatgcgcccgttgtcgcatctcaacacgactatgatagagatcaaataaagcgcgaattaaatagcttgcgacgcaacgtgcacgatctgtgcacgcgttccggcacgagctttgattgtaataagtttttacgaagcgatgacatgacccccgtagtgacaacgatcacgcccaaaagaactgccgactacaaaattaccgagtatgtcggtgacgttaaaactattaagccatccaatcgaccgttagtcgaatcaggaccgctggtgcgagaagccgcgaagtatggcgaatgcatcgtataacgtgtggagtccgctcattagagcgtcatgtttagacaagaaagctacatatttaattgatcccgatgattttattgataaattgaccctaactccatacacggtattctacaatggcggggttttggtcaaaatttccggactgcgattgtacatgctgttaacggctccgcccactattaatgaaattaaaaattccaattttaaaaaacgcagcaagagaaacatttgtatgaaagaatgcgtagaaggaaagaaaaatgtcgtcgacatgctgaacaacaagattaatatgcctccgtgtataaaaaaaatattgaacgatttgaaagaaaacaatgtaccgcgcggcggtatgtacaggaagaggtttatactaaactgttacattgcaaacgtggtttcgtgtgccaagtgtgaaaaccgatgtttaatcaaggctctgacgcatttctacaaccacgactccaagtgtgtgggtgaagtcatgcatcttttaatcaaatcccaagatgtgtataaaccaccaaactgccaaaaaatgaaaactgtcgacaagctctgtccgtttgctggcaactgcaagggtctcaatcctatttgtaattattgaataataaaacaattataaatgctaaatttgttttttattaacgatacaaaccaaacgcaacaagaacatttgtagtattatctataattgaaaacgcgtagttataatcgctgaggtaatatttaaaatcattttcaaatgattcacagttaatttgcgacaatataattttattttcacataaactagacgccttgtcgtcttcttcttcgtattccttctctttttcatttttctcctcataaaaattaacatagttattatcgtatccatatatgtatctatcgtatagagtaaattttttgttgtcataaatatatatgtcttttttaatggggtgtatagtaccgctgcgcatagtttttctgtaatttacaacagtgctattttctggtagttcttcggagtgtgttgctttaattattaaatttatataatcaatgaatttgggatcgtcggttttgtacaatatgttgccggcatagtacgcagcttcttctagttcaattacaccattttttagcagcaccggattaacataactttccaaaatgttgtacgaaccgttaaacaaaaacagttcacctcccttttctatactattgtctgcgagcagttgtttgttgttaaaaataacagccattgtaatgagacgcacaaactaatatcacaaactggaaatgtctatcaatatatagttgctgatatcatggagataattaaaatgataaccatctcgcaaataaataagtattttactgttttcgtaacagttttgtaataaaaaaacctataaatattccggattattcataccgtcccaccatcgggcgcggatctatgctactagtaaatcagtcacaccaaggcttcaataaggaacacacaagcaagatggtaagcgctattgttttatatgtgcttttggcggcggcggcgcattctgcctttgcggcggatcccggggacaagatctgtctgggacaccacgccgtgtctaatggcgccaaggtgaacaccctgaccgagaggggcgtggaagtggtgaatgccaccgagaccgtggagagaaccaacgtgcccaggatctgtagcaagggcaagagaaccgtggatctgggacagtgtggactgctgggcacaatcacaggacccccccagtgtgatcagttcctggagttcagcgccgatctgatcatcgagcggagagaaggcaacgatgtgtgctaccccggcaagttcgtgaatgaggaggccctgaggcagatcctgagaaagagcggcggcatcgacaaggaaaccatgggcttcacctacagcggcatcagaaccaatggagccacctccgcctgtagaagaagcggcagcagcttctacgccgagatgaagtggctgctgtccaacacagacaatgccgccttcccccagatgaccaagagctacaagaacatcaggaaggaccccgccctgatcatttggggcatccaccactctggatctacagccgagcagaccaagctgtatggcagcggcaacaagctgatcacagtgggcagcagcaattaccagcagagcttcgtgccttctcctggagccagacctcaggtgaacggccagagcggcagaatcgatttccactggctgatgctgaaccccaacgacaccgtgaccttcagcttcaacggcgcctttatcgcccctgatagggcctctttcctgaggggcaagagcatgggcatccagtctgaagtgcaggtggacgccaattgtgagggcgattgctaccacagcggcggcacaattctgagcagcctgcccttccagaacatcaacagcaggacagtgggcgagtgtcccagatatgtgaagcaggagagcctgctgctggccacaggcatgaagaacgtgccccagagagagacaagaggcctgtttggagccatcgccggattcatcgagaatggctgggagggactggtggatggctggtacggcttcagacaccagaatgcccagggagaaggaacagccgccgactacaagtctacacagagcgccatcgatcagatcaccggcaagctgaacaggctgatcgagaaaaccaatcagcagtttgagctgatcgacaacgagttcaccgaggtggagaagcagatcggcaacgtgatcaactggaccagagacagcctgacagagatgtggagctacaacgccgaactgctggtggccatggagaatcagcacaccatcgacctggccgacagcgagatgaacaagctgtacgagagagtgaggaggcagctgagagagaatgccgaggaggacggcacaggctgcttcgagatcttccacaagtgtgacgacgactgtatggccagcatccggaacaacacctacgaccacagcaagtacagagaggaggccatccagaacagaatccagatcgacagcggcagactggtgcctagaggatctcctggcagcggatatattcctgaggcccctagagatggacaggcctatgtgagaaaggatggcgaatgggtgctgctgtctacatttctgggacaccaccatcaccaccattgatgagcggccgctgcagatctgatcctttcctgggacccggcaagaaccaaaaactcactctcttcaaggaaatccgtaatgttaaacccgacacgatgaagcttgtcgttggatggaaaggaaaagagttctacagggaaacttggacccgcttcatggaagacagcttccccattgttaacgaccaagaagtgatggatgttttccttgttgtcaacatgcgtcccactagacccaaccgttgttacaaattcctggcccaacacgctctgcgttgcgaccccgactatgtacctcatgacgtgattaggatcgtcgagccttcatgggtgggcagcaacaacgagtaccgcatcagcctggctaagaagggcggcggctgcccaataatgaaccttcactctgagtacaccaactcgttcgaacagttcatcgatcgtgtcatctgggagaacttctacaagcccatcgtttacatcggtaccgactctgctgaagaggaggaaattctccttgaagtttccctggtgttcaaagtaaaggagtttgcaccagacgcacctctgttcactggtccggcgtattaaaacacgatacattgttattagtacatttattaagcgctagattctgtgcgttgttgatttacagacaattgttgtacgtattttaataattcattaaatttataatctttagggtggtatgttagagcgaaaatcaaatgattttcagcgtctttatatctgaatttaaatattaaatcctcaatagatttgtaaaataggtttcgattagtttcaaacaagggttgtttttccgaaccgatggctggactatctaatggattttcgctcaacgccacaaaacttgccaaatcttgtagcagcaatctagctttgtcgatattcgtttgtgttttgttttgtaataaaggttcgacgtcgttcaaaatattatgcgcttttgtatttctttcatcactgtcgttagtgtacaattgactcgacgtaaacacgttaaataaagcttggacatatttaacatcgggcgtgttagctttattaggccgattatcgtcgtcgtcccaaccctcgtcgttagaagttgcttccgaagacgattttgccatagccacacgacgcctattaattgtgtcggctaacacgtccgcgatcaaatttgtagttgagctttttggaattatttctgattgcgggcgtttttgggcgggtttcaatctaactgtgcccgattttaattcagacaacacgttagaaagcgatggtgcaggcggtggtaacatttcagacggcaaatctactaatggcggcggtggtggagctgatgataaatctaccatcggtggaggcgcaggcggggctggcggcggaggcggaggcggaggtggtggcggtgatgcagacggcggtttaggctcaaatgtctctttaggcaacacagtcggcacctcaactattgtactggtttcgggcgccgtttttggtttgaccggtctgagacgagtgcgatttttttcgtttctaatagcttccaacaattgttgtctgtcgtctaaaggtgcagcgggttgaggttccgtcggcattggtggagcgggcggcaattcagacatcgatggtggtggtggtggtggaggcgctggaatgttaggcacgggagaaggtggtggcggcggtgccgccggtataatttgttctggtttagtttgttcgcgcacgattgtgggcaccggcgcaggcgccgctggctgcacaacggaaggtcgtctgcttcgaggcagcgcttggggtggtggcaattcaatattataattggaatacaaatcgtaaaaatctgctataagcattgtaatttcgctatcgtttaccgtgccgatatttaacaaccgctcaatgtaagcaattgtattgtaaagagattgtctcaagctccgcacgccgataacaagccttttcatttttactacagcattgtagtggcgagacacttcgctgtcgtcgacgtacatgtatgctttgttgtcaaaaacgtcgttggcaagctttaaaatatttaaaagaacatctctgttcagcaccactgtgttgtcgtaaatgttgtttttgataatttgcgcttccgcagtatcgacacgttcaaaaaattgatgcgcatcaattttgttgttcctattattgaataaataagattgtacagattcatatctacgattcgtcatggccaccacaaatgctacgctgcaaacgctggtacaattttacgaaaactgcaaaaacgtcaaaactcggtataaaataatcaacgggcgctttggcaaaatatctattttatcgcacaagcccactagcaaattgtatttgcagaaaacaatttcggcgcacaattttaacgctgacgaaataaaagttcaccagttaatgagcgaccacccaaattttataaaaatctattttaatcacggttccatcaacaaccaagtgatcgtgatggactacattgactgtcccgatttatttgaaacactacaaattaaaggcgagctttcgtaccaacttgttagcaatattattagacagctgtgtgaagcgctcaacgatttgcacaagcacaatttcatacacaacgacataaaactcgaaaatgtcttatatttcgaagcacttgatcgcgtgtatgtttgcgattacggattgtgcaaacacgaaaactcacttagcgtgcacgacggcacgttggagtattttagtccggaaaaaattcgacacacaactatgcacgtttcgtttgactggtacgcggcgtgttaacatacaagttgctaaccggcggttcgtaatcatggtcatagctgtttcctgtgtgaaattgttatccgctcacaattccacacaacatacgagccggaagcataaagtgtaaagcctggggtgcctaatgagtgagctaactcacattaattgcgttgcgctcactgcccgctttccagtcgggaaacctgtcgtgccagctgcattaatgaatcggccaacgcgcggggagaggcggtttgcgtattgggcgctcttccgcttcctcgctcactgactcgctgcgctcggtcgttcggctgcggcgagcggtatcagctcactcaaaggcggtaatacggttatccacagaatcaggggataacgcaggaaagaacatgtgagcaaaaggccagcaaaaggccaggaaccgtaaaaaggccgcgttgctggcgtttttccataggctccgcccccctgacgagcatcacaaaaatcgacgctcaagtcagaggtggcgaaacccgacaggactataaagataccaggcgtttccccctggaagctccctcgtgcgctctcctgttccgaccctgccgcttaccggatacctgtccgcctttctcccttcgggaagcgtggcgctttctcatagctcacgctgtaggtatctcagttcggtgtaggtcgttcgctccaagctgggctgtgtgcacgaaccccccgttcagcccgaccgctgcgccttatccggtaactatcgtcttgagtccaacccggtaagacacgacttatcgccactggcagcagccactggtaacaggattagcagagcgaggtatgtaggcggtgctacagagttcttgaagtggtggcctaactacggctacactagaaggacagtatttggtatctgcgctctgctgaagccagttaccttcggaaaaagagttggtagctcttgatccggcaaacaaaccaccgctggtagcggtggtttttttgtttgcaagcagcagattacgcgcagaaaaaaaggatctcaagaagatcctttgatcttttctacggggtctgacgctcagtggaacgaaaactcacgttaagggattttggtcatgagattatcaaaaaggatcttcacctagatccttttaaattaaaaatgaagttttaaatcaatctaaagtatatatgagtaaacttggtctgacagttaccaatgcttaatcagtgaggcacctatctcagcgatctgtctatttcgttcatccatagttgcctgactccccgtcgtgtagataactacgatacgggagggcttaccatctggccccagtgctgcaatgataccgcgagacccacgctcaccggctccagatttatcagcaataaaccagccagccggaagggccgagcgcagaagtggtcctgcaactttatccgcctccatccagtctattaattgttgccgggaagctagagtaagtagttcgccagttaatagtttgcgcaacgttgttgccattgctacaggcatcgtggtgtcacgctcgtcgtttggtatggcttcattcagctccggttcccaacgatcaaggcgagttacatgatcccccatgttgtgcaaaaaagcggttagctccttcggtcctccgatcgttgtcagaagtaagttggccgcagtgttatcactcatggttatggcagcactgcataattctcttactgtcatgccatccgtaagatgcttttctgtgactggtgagtactcaaccaagtcattctgagaatagtgtatgcggcgaccgagttgctcttgcccggcgtcaatacgggataataccgcgccacatagcagaactttaaaagtgctcatcattggaaaacgttcttcggggcgaaaactctcaaggatcttaccgctgttgagatccagttcgatgtaacccactcgtgcacccaactgatcttcagcatcttttactttcaccagcgtttctgggtgagcaaaaacaggaaggcaaaatgccgcaaaaaagggaataagggcgacacggaaatgttgaatactcatactcttcctttttcaatattattgaagcatttatcagggttattgtctcatgagcggatacatatttgaatgtatttagaaaaataaacaaataggggttccgcgcacatttccccgaaaagtgccacctgacgtctaagaaaccattattatcatgacattaacctataaaaataggcgtatcacgaggccctttcgtctcgcgcgtttcggtgatgacggtgaaaacctctgacacatgcagctcccggagacggtcacagcttgtctgtaagcggatgccgggagcagacaagcccgtcagggcgcgtcagcgggtgttggcgggtgtcggggctggcttaactatgcggcatcagagcagattgtactgagagtgcaccatatgcggtgtgaaataccgcacagatgcgtaaggagaaaataccgcatcaggcgccattcgccattcaggctgcgcaactgttgggaagggcgatcggtgcgggcctcttcgctattacgccagctggcgaaagggggatgtgctgcaaggcgattaagttgggtaacgccagggttttcccagtcacgacgttgtaaaacgacggccagtgcc

SEQ ID NO: 84 - DNA, 11368 bp, Artificial Sequence
  Plasmid DNA: 53502
aagctttactcgtaaagcgagttgaaggatcatatttagttgcgtttatgagataagattgaaagcacgtgtaaaatgtttcccgcgcgttggcacaactatttacaatgcggccaagttataaaagattctaatctgatatgttttaaaacacctttgcggcccgagttgtttgcgtacgtgactagcgaagaagatgtgtggaccgcagaacagatagtaaaacaaaaccctagtattggagcaataatcgatttaaccaacacgtctaaatattatgatggtgtgcattttttgcgggcgggcctgttatacaaaaaaattcaagtacctggccagactttgccgcctgaaagcatagttcaagaatttattgacacggtaaaagaatttacagaaaagtgtcccggcatgttggtgggcgtgcactgcacacacggtattaatcgcaccggttacatggtgtgcagatatttaatgcacaccctgggtattgcgccgcaggaagccatagatagattcgaaaaagccagaggtcacaaaattgaaagacaaaattacgttcaagatttattaatttaattaatattatttgcattctttaacaaatactttatcctattttcaaattgttgcgcttcttccagcgaaccaaaactatgcttcgcttgctccgtttagcttgtagccgatcagtggcgttgttccaatcgacggtaggattaggccggatattctccaccacaatgttggcaacgttgatgttacgtttatgcttttggttttccacgtacgtcttttggccggtaatagccgtaaacgtagtgccgtcgcgcgtcacgcacaacaccggatgtttgcgcttgtccgcggggtattgaaccgcgcgatccgacaaatccaccactttggcaactaaatcggtgacctgcgcgtcttttttctgcattatttcgtctttcttttgcatggtttcctggaagccggtgtacatgcggtttagatcagtcatgacgcgcgtgacctgcaaatctttggcctcgatctgcttgtccttgatggcaacgatgcgttcaataaactcttgttttttaacaagttcctcggttttttgcgccaccaccgcttgcagcgcgtttgtgtgctcggtgaatgtcgcaatcagcttagtcaccaactgtttgctctcctcctcccgttgtttgatcgcgggatcgtacttgccggtgcagagcacttgaggaattacttcttctaaaagccattcttgtaattctatggcgtaaggcaatttggacttcataatcagctgaatcacgccggatttagtaatgagcactgtatgcggctgcaaatacagcgggtcgccccttttcacgacgctgttagaggtagggcccccattttggatggtctgctcaaataacgatttgtatttattgtctacatgaacacgtatagctttatcacaaactgtatattttaaactgttagcgacgtccttggccacgaaccggacctgttggtcgcgctctagcacgtaccgcaggttgaacgtatcttctccaaatttaaattctccaattttaacgcgagccattttgatacacgtgtgtcgattttgcaacaactattgttttttaacgcaaactaaacttattgtggtaagcaataattaaatatgggggaacatgcgccgctacaacactcgtcgttatgaacgcagacggcgccggtctcggcgcaagcggctaaaacgtgttgcgcgttcaacgcggcaaacatcgcaaaagccaatagtacagttttgatttgcatattaacggcgattttttaaattatcttatttaataaatagttatgacgcctacaactccccgcccgcgttgactcgctgcacctcgagcagttcgttgacgccttcctccgtgtggccgaacacgtcgagcgggtggtcgatgaccagcggcgtgccgcacgcgacgcacaagtatctgtacaccgaatgatcgtcgggcgaaggcacgtcggcctccaagtggcaatattggcaaattcgaaaatatatacagttgggttgtttgcgcatatctatcgtggcgttgggcatgtacgtccgaacgttgatttgcatgcaagccgaaattaaatcattgcgattagtgcgattaaaacgttgtacatcctcgcttttaatcatgccgtcgattaaatcgcgcaatcgagtcaagtgatcaaagtgtggaataatgttttctttgtattcccgagtcaagcgcagcgcgtattttaacaaactagccatcttgtaagttagtttcatttaatgcaactttatccaataatatattatgtatcgcacgtcaagaattaacaatgcgcccgttgtcgcatctcaacacgactatgatagagatcaaataaagcgcgaattaaatagcttgcgacgcaacgtgcacgatctgtgcacgcgttccggcacgagctttgattgtaataagtttttacgaagcgatgacatgacccccgtagtgacaacgatcacgcccaaaagaactgccgactacaaaattaccgagtatgtcggtgacgttaaaactattaagccatccaatcgaccgttagtcgaatcaggaccgctggtgcgagaagccgcgaagtatggcgaatgcatcgtataacgtgtggagtccgctcattagagcgtcatgtttagacaagaaagctacatatttaattgatcccgatgattttattgataaattgaccctaactccatacacggtattctacaatggcggggttttggtcaaaatttccggactgcgattgtacatgctgttaacggctccgcccactattaatgaaattaaaaattccaattttaaaaaacgcagcaagagaaacatttgtatgaaagaatgcgtagaaggaaagaaaaatgtcgtcgacatgctgaacaacaagattaatatgcctccgtgtataaaaaaaatattgaacgatttgaaagaaaacaatgtaccgcgcggcggtatgtacaggaagaggtttatactaaactgttacattgcaaacgtggtttcgtgtgccaagtgtgaaaaccgatgtttaatcaaggctctgacgcatttctacaaccacgactccaagtgtgtgggtgaagtcatgcatcttttaatcaaatcccaagatgtgtataaaccaccaaactgccaaaaaatgaaaactgtcgacaagctctgtccgtttgctggcaactgcaagggtctcaatcctatttgtaattattgaataataaaacaattataaatgctaaatttgttttttattaacgatacaaaccaaacgcaacaagaacatttgtagtattatctataattgaaaacgcgtagttataatcgctgaggtaatatttaaaatcattttcaaatgattcacagttaatttgcgacaatataattttattttcacataaactagacgccttgtcgtcttcttcttcgtattccttctctttttcatttttctcctcataaaaattaacatagttattatcgtatccatatatgtatctatcgtatagagtaaattttttgttgtcataaatatatatgtcttttttaatggggtgtatagtaccgctgcgcatagtttttctgtaatttacaacagtgctattttctggtagttcttcggagtgtgttgctttaattattaaatttatataatcaatgaatttgggatcgtcggttttgtacaatatgttgccggcatagtacgcagcttcttctagttcaattacaccattttttagcagcaccggattaacataactttccaaaatgttgtacgaaccgttaaacaaaaacagttcacctcccttttctatactattgtctgcgagcagttgtttgttgttaaaaataacagccattgtaatgagacgcacaaactaatatcacaaactggaaatgtctatcaatatatagttgctgatatcatggagataattaaaatgataaccatctcgcaaataaataagtattttactgttttcgtaacagttttgtaataaaaaaacctataaatattccggattattcataccgtcccaccatcgggcgcggatctatgctactagtaaatcagtcacaccaaggcttcaataaggaacacacaagcaagatggtaagcgctattgttttatatgtgcttttggcggcggcggcgcattctgcctttgcggcggatcccggggacaagatctgtatcggccaccagagcaccaatagcaccgagaccgtggataccctgaccgagaccaatgtgcctgtgacacacgccaaagagctgctgcacaccgagcacaatggaatgctgtgtgccacaagcctgggacaccctctgatcctggacacctgtacaatcgagggcctggtgtacggcaatcccagctgtgatctgctgctggagggccgggagtggagctacatcgtggagagaagcagcgccgtgaatggcacatgctaccccggcaacgtggagaatctggaggagctgaggaccctgtttagcagcgccagcagctaccagagaatccagatcttccccgacaccacctggaatgtgacctacaccggcacaagcagagcctgtagcggcagcttctaccggtctatgagatggctgacccagaagagcggcttttaccctgtgcaggacgcccagtacaccaacaaccggggcaagagcatcctgtttgtgtggggcattcaccaccctcctacctacaccgagcagaccaacctgtacatccggaacgacaccaccacaagcgtgaccaccgaggacctgaacagaaccttcaagcccgtgatcggacctagacctctggtgaatggcctgcagggcaggatcgattactactggagcgtgctgaagcctggacagaccctgagagtgaggagcaacggcaatctgatcgccccttggtatggacatgtgctgtctggaggaagccacggcagaatcctgaaaaccgacctgaagagcggcaattgtgtggtgcagtgccagacagagaagggcggcctgaatagcacactgcccttccacaacatcagcaagtacgccttcggcacctgtcccaagtatgtgagggtgaacagcctgaaactggctgtgggcctgagaaatgtgcctcagagggagaccagaggactgtttggagccatcgccggattcatcgaagggggatggcctggactggtggccggatggtatggcttccagcacagcaatgatcagggagtgggaatggccgccgatagagactctacccagaaggccatcgacaagatcaccagcaaggtgaacaacatcgtggacaagatgaacaagcagtacgagatcatcgaccacgagttcagcgaggtggagaccaggctgaacatgatcaacaacaagatcgacgaccagatccaggatgtgtgggcctataatgccgaactgctggtgctgctggaaaaccagaaaaccctggacgagcacgacgccaacgtgaacaatctgtacaacaaggtgaagagagccctgggaagcaacgccatggaggatggcaagggctgctttgagctgtaccacaagtgtgacgaccagtgtatggagacaatcaggaacggcacctacaaccggaggaagtacagggaggagagcagactggagaggcagaaaatcgagagcggcagactggtgcctagaggatctcctggcagcggatatattcctgaggcccctagagatggacaggcctatgtgagaaaggatggcgaatgggtgctgctgtctacatttctgggacaccaccatcaccaccattgatgagcggccgctgcagatctgatcctttcctgggacccggcaagaaccaaaaactcactctcttcaaggaaatccgtaatgttaaacccgacacgatgaagcttgtcgttggatggaaaggaaaagagttctacagggaaacttggacccgcttcatggaagacagcttccccattgttaacgaccaagaagtgatggatgttttccttgttgtcaacatgcgtcccactagacccaaccgttgttacaaattcctggcccaacacgctctgcgttgcgaccccgactatgtacctcatgacgtgattaggatcgtcgagccttcatgggtgggcagcaacaacgagtaccgcatcagcctggctaagaagggcggcggctgcccaataatgaaccttcactctgagtacaccaactcgttcgaacagttcatcgatcgtgtcatctgggagaacttctacaagcccatcgtttacatcggtaccgactctgctgaagaggaggaaattctccttgaagtttccctggtgttcaaagtaaaggagtttgcaccagacgcacctctgttcactggtccggcgtattaaaacacgatacattgttattagtacatttattaagcgctagattctgtgcgttgttgatttacagacaattgttgtacgtattttaataattcattaaatttataatctttagggtggtatgttagagcgaaaatcaaatgattttcagcgtctttatatctgaatttaaatattaaatcctcaatagatttgtaaaataggtttcgattagtttcaaacaagggttgtttttccgaaccgatggctggactatctaatggattttcgctcaacgccacaaaacttgccaaatcttgtagcagcaatctagctttgtcgatattcgtttgtgttttgttttgtaataaaggttcgacgtcgttcaaaatattatgcgcttttgtatttctttcatcactgtcgttagtgtacaattgactcgacgtaaacacgttaaataaagcttggacatatttaacatcgggcgtgttagctttattaggccgattatcgtcgtcgtcccaaccctcgtcgttagaagttgcttccgaagacgattttgccatagccacacgacgcctattaattgtgtcggctaacacgtccgcgatcaaatttgtagttgagctttttggaattatttctgattgcgggcgtttttgggcgggtttcaatctaactgtgcccgattttaattcagacaacacgttagaaagcgatggtgcaggcggtggtaacatttcagacggcaaatctactaatggcggcggtggtggagctgatgataaatctaccatcggtggaggcgcaggcggggctggcggcggaggcggaggcggaggtggtggcggtgatgcagacggcggtttaggctcaaatgtctctttaggcaacacagtcggcacctcaactattgtactggtttcgggcgccgtttttggtttgaccggtctgagacgagtgcgatttttttcgtttctaatagcttccaacaattgttgtctgtcgtctaaaggtgcagcgggttgaggttccgtcggcattggtggagcgggcggcaattcagacatcgatggtggtggtggtggtggaggcgctggaatgttaggcacgggagaaggtggtggcggcggtgccgccggtataatttgttctggtttagtttgttcgcgcacgattgtgggcaccggcgcaggcgccgctggctgcacaacggaaggtcgtctgcttcgaggcagcgcttggggtggtggcaattcaatattataattggaatacaaatcgtaaaaatctgctataagcattgtaatttcgctatcgtttaccgtgccgatatttaacaaccgctcaatgtaagcaattgtattgtaaagagattgtctcaagctccgcacgccgataacaagccttttcatttttactacagcattgtagtggcgagacacttcgctgtcgtcgacgtacatgtatgctttgttgtcaaaaacgtcgttggcaagctttaaaatatttaaaagaacatctctgttcagcaccactgtgttgtcgtaaatgttgtttttgataatttgcgcttccgcagtatcgacacgttcaaaaaattgatgcgcatcaattttgttgttcctattattgaataaataagattgtacagattcatatctacgattcgtcatggccaccacaaatgctacgctgcaaacgctggtacaattttacgaaaactgcaaaaacgtcaaaactcggtataaaataatcaacgggcgctttggcaaaatatctattttatcgcacaagcccactagcaaattgtatttgcagaaaacaatttcggcgcacaattttaacgctgacgaaataaaagttcaccagttaatgagcgaccacccaaattttataaaaatctattttaatcacggttccatcaacaaccaagtgatcgtgatggactacattgactgtcccgatttatttgaaacactacaaattaaaggcgagctttcgtaccaacttgttagcaatattattagacagctgtgtgaagcgctcaacgatttgcacaagcacaatttcatacacaacgacataaaactcgaaaatgtcttatatttcgaagcacttgatcgcgtgtatgtttgcgattacggattgtgcaaacacgaaaactcacttagcgtgcacgacggcacgttggagtattttagtccggaaaaaattcgacacacaactatgcacgtttcgtttgactggtacgcggcgtgttaacatacaagttgctaaccggcggttcgtaatcatggtcatagctgtttcctgtgtgaaattgttatccgctcacaattccacacaacatacgagccggaagcataaagtgtaaagcctggggtgcctaatgagtgagctaactcacattaattgcgttgcgctcactgcccgctttccagtcgggaaacctgtcgtgccagctgcattaatgaatcggccaacgcgcggggagaggcggtttgcgtattgggcgctcttccgcttcctcgctcactgactcgctgcgctcggtcgttcggctgcggcgagcggtatcagctcactcaaaggcggtaatacggttatccacagaatcaggggataacgcaggaaagaacatgtgagcaaaaggccagcaaaaggccaggaaccgtaaaaaggccgcgttgctggcgtttttccataggctccgcccccctgacgagcatcacaaaaatcgacgctcaagtcagaggtggcgaaacccgacaggactataaagataccaggcgtttccccctggaagctccctcgtgcgctctcctgttccgaccctgccgcttaccggatacctgtccgcctttctcccttcgggaagcgtggcgctttctcatagctcacgctgtaggtatctcagttcggtgtaggtcgttcgctccaagctgggctgtgtgcacgaaccccccgttcagcccgaccgctgcgccttatccggtaactatcgtcttgagtccaacccggtaagacacgacttatcgccactggcagcagccactggtaacaggattagcagagcgaggtatgtaggcggtgctacagagttcttgaagtggtggcctaactacggctacactagaaggacagtatttggtatctgcgctctgctgaagccagttaccttcggaaaaagagttggtagctcttgatccggcaaacaaaccaccgctggtagcggtggtttttttgtttgcaagcagcagattacgcgcagaaaaaaaggatctcaagaagatcctttgatcttttctacggggtctgacgctcagtggaacgaaaactcacgttaagggattttggtcatgagattatcaaaaaggatcttcacctagatccttttaaattaaaaatgaagttttaaatcaatctaaagtatatatgagtaaacttggtctgacagttaccaatgcttaatcagtgaggcacctatctcagcgatctgtctatttcgttcatccatagttgcctgactccccgtcgtgtagataactacgatacgggagggcttaccatctggccccagtgctgcaatgataccgcgagacccacgctcaccggctccagatttatcagcaataaaccagccagccggaagggccgagcgcagaagtggtcctgcaactttatccgcctccatccagtctattaattgttgccgggaagctagagtaagtagttcgccagttaatagtttgcgcaacgttgttgccattgctacaggcatcgtggtgtcacgctcgtcgtttggtatggcttcattcagctccggttcccaacgatcaaggcgagttacatgatcccccatgttgtgcaaaaaagcggttagctccttcggtcctccgatcgttgtcagaagtaagttggccgcagtgttatcactcatggttatggcagcactgcataattctcttactgtcatgccatccgtaagatgcttttctgtgactggtgagtactcaaccaagtcattctgagaatagtgtatgcggcgaccgagttgctcttgcccggcgtcaatacgggataataccgcgccacatagcagaactttaaaagtgctcatcattggaaaacgttcttcggggcgaaaactctcaaggatcttaccgctgttgagatccagttcgatgtaacccactcgtgcacccaactgatcttcagcatcttttactttcaccagcgtttctgggtgagcaaaaacaggaaggcaaaatgccgcaaaaaagggaataagggcgacacggaaatgttgaatactcatactcttcctttttcaatattattgaagcatttatcagggttattgtctcatgagcggatacatatttgaatgtatttagaaaaataaacaaataggggttccgcgcacatttccccgaaaagtgccacctgacgtctaagaaaccattattatcatgacattaacctataaaaataggcgtatcacgaggccctttcgtctcgcgcgtttcggtgatgacggtgaaaacctctgacacatgcagctcccggagacggtcacagcttgtctgtaagcggatgccgggagcagacaagcccgtcagggcgcgtcagcgggtgttggcgggtgtcggggctggcttaactatgcggcatcagagcagattgtactgagagtgcaccatatgcggtgtgaaataccgcacagatgcgtaaggagaaaataccgcatcaggcgccattcgccattcaggctgcgcaactgttgggaagggcgatcggtgcgggcctcttcgctattacgccagctggcgaaagggggatgtgctgcaaggcgattaagttgggtaacgccagggttttcccagtcacgacgttgtaaaacgacggccagtgcc

SEQ ID NO: 85 - DNA, 11380 bp, Artificial Sequence
  Plasmid DNA: 53506
aagctttactcgtaaagcgagttgaaggatcatatttagttgcgtttatgagataagattgaaagcacgtgtaaaatgtttcccgcgcgttggcacaactatttacaatgcggccaagttataaaagattctaatctgatatgttttaaaacacctttgcggcccgagttgtttgcgtacgtgactagcgaagaagatgtgtggaccgcagaacagatagtaaaacaaaaccctagtattggagcaataatcgatttaaccaacacgtctaaatattatgatggtgtgcattttttgcgggcgggcctgttatacaaaaaaattcaagtacctggccagactttgccgcctgaaagcatagttcaagaatttattgacacggtaaaagaatttacagaaaagtgtcccggcatgttggtgggcgtgcactgcacacacggtattaatcgcaccggttacatggtgtgcagatatttaatgcacaccctgggtattgcgccgcaggaagccatagatagattcgaaaaagccagaggtcacaaaattgaaagacaaaattacgttcaagatttattaatttaattaatattatttgcattctttaacaaatactttatcctattttcaaattgttgcgcttcttccagcgaaccaaaactatgcttcgcttgctccgtttagcttgtagccgatcagtggcgttgttccaatcgacggtaggattaggccggatattctccaccacaatgttggcaacgttgatgttacgtttatgcttttggttttccacgtacgtcttttggccggtaatagccgtaaacgtagtgccgtcgcgcgtcacgcacaacaccggatgtttgcgcttgtccgcggggtattgaaccgcgcgatccgacaaatccaccactttggcaactaaatcggtgacctgcgcgtcttttttctgcattatttcgtctttcttttgcatggtttcctggaagccggtgtacatgcggtttagatcagtcatgacgcgcgtgacctgcaaatctttggcctcgatctgcttgtccttgatggcaacgatgcgttcaataaactcttgttttttaacaagttcctcggttttttgcgccaccaccgcttgcagcgcgtttgtgtgctcggtgaatgtcgcaatcagcttagtcaccaactgtttgctctcctcctcccgttgtttgatcgcgggatcgtacttgccggtgcagagcacttgaggaattacttcttctaaaagccattcttgtaattctatggcgtaaggcaatttggacttcataatcagctgaatcacgccggatttagtaatgagcactgtatgcggctgcaaatacagcgggtcgccccttttcacgacgctgttagaggtagggcccccattttggatggtctgctcaaataacgatttgtatttattgtctacatgaacacgtatagctttatcacaaactgtatattttaaactgttagcgacgtccttggccacgaaccggacctgttggtcgcgctctagcacgtaccgcaggttgaacgtatcttctccaaatttaaattctccaattttaacgcgagccattttgatacacgtgtgtcgattttgcaacaactattgttttttaacgcaaactaaacttattgtggtaagcaataattaaatatgggggaacatgcgccgctacaacactcgtcgttatgaacgcagacggcgccggtctcggcgcaagcggctaaaacgtgttgcgcgttcaacgcggcaaacatcgcaaaagccaatagtacagttttgatttgcatattaacggcgattttttaaattatcttatttaataaatagttatgacgcctacaactccccgcccgcgttgactcgctgcacctcgagcagttcgttgacgccttcctccgtgtggccgaacacgtcgagcgggtggtcgatgaccagcggcgtgccgcacgcgacgcacaagtatctgtacaccgaatgatcgtcgggcgaaggcacgtcggcctccaagtggcaatattggcaaattcgaaaatatatacagttgggttgtttgcgcatatctatcgtggcgttgggcatgtacgtccgaacgttgatttgcatgcaagccgaaattaaatcattgcgattagtgcgattaaaacgttgtacatcctcgcttttaatcatgccgtcgattaaatcgcgcaatcgagtcaagtgatcaaagtgtggaataatgttttctttgtattcccgagtcaagcgcagcgcgtattttaacaaactagccatcttgtaagttagtttcatttaatgcaactttatccaataatatattatgtatcgcacgtcaagaattaacaatgcgcccgttgtcgcatctcaacacgactatgatagagatcaaataaagcgcgaattaaatagcttgcgacgcaacgtgcacgatctgtgcacgcgttccggcacgagctttgattgtaataagtttttacgaagcgatgacatgacccccgtagtgacaacgatcacgcccaaaagaactgccgactacaaaattaccgagtatgtcggtgacgttaaaactattaagccatccaatcgaccgttagtcgaatcaggaccgctggtgcgagaagccgcgaagtatggcgaatgcatcgtataacgtgtggagtccgctcattagagcgtcatgtttagacaagaaagctacatatttaattgatcccgatgattttattgataaattgaccctaactccatacacggtattctacaatggcggggttttggtcaaaatttccggactgcgattgtacatgctgttaacggctccgcccactattaatgaaattaaaaattccaattttaaaaaacgcagcaagagaaacatttgtatgaaagaatgcgtagaaggaaagaaaaatgtcgtcgacatgctgaacaacaagattaatatgcctccgtgtataaaaaaaatattgaacgatttgaaagaaaacaatgtaccgcgcggcggtatgtacaggaagaggtttatactaaactgttacattgcaaacgtggtttcgtgtgccaagtgtgaaaaccgatgtttaatcaaggctctgacgcatttctacaaccacgactccaagtgtgtgggtgaagtcatgcatcttttaatcaaatcccaagatgtgtataaaccaccaaactgccaaaaaatgaaaactgtcgacaagctctgtccgtttgctggcaactgcaagggtctcaatcctatttgtaattattgaataataaaacaattataaatgctaaatttgttttttattaacgatacaaaccaaacgcaacaagaacatttgtagtattatctataattgaaaacgcgtagttataatcgctgaggtaatatttaaaatcattttcaaatgattcacagttaatttgcgacaatataattttattttcacataaactagacgccttgtcgtcttcttcttcgtattccttctctttttcatttttctcctcataaaaattaacatagttattatcgtatccatatatgtatctatcgtatagagtaaattttttgttgtcataaatatatatgtcttttttaatggggtgtatagtaccgctgcgcatagtttttctgtaatttacaacagtgctattttctggtagttcttcggagtgtgttgctttaattattaaatttatataatcaatgaatttgggatcgtcggttttgtacaatatgttgccggcatagtacgcagcttcttctagttcaattacaccattttttagcagcaccggattaacataactttccaaaatgttgtacgaaccgttaaacaaaaacagttcacctcccttttctatactattgtctgcgagcagttgtttgttgttaaaaataacagccattgtaatgagacgcacaaactaatatcacaaactggaaatgtctatcaatatatagttgctgatatcatggagataattaaaatgataaccatctcgcaaataaataagtattttactgttttcgtaacagttttgtaataaaaaaacctataaatattccggattattcataccgtcccaccatcgggcgcggatctatgctactagtaaatcagtcacaccaaggcttcaataaggaacacacaagcaagatggtaagcgctattgttttatatgtgcttttggcggcggcggcgcattctgcctttgcggcggatcccggggacagaatctgtgtgggctacctgagcaccaatagcagcgagagagtggataccctgctggagaacaacgtgcctgtgaccagctctgtggatctggtggagaccaatcacaccggcacctactgtagcctgggcggcatttctcctgtgcacctgggcgattgttctttcgagggctggattgtgggaaatcctgcctgtgccagcaatctgggcatcagggagtggagctacctgatcgaagatccttctgcccctcacggcctgtgttatcctggcgagctggacaataacggcgagctgaggcacctgtttagcggcatccggagctttagcaggacagagctgatcgcccctacatcttggggagccgtgaatgatggagtgagcagcgcctgtcaggataagggcgccagcagcttctacagaaacctggtgtggttcgtggagaggggcaacaagtaccctgtgatccggggcacctacaataataccaccggcagggacgtgctggtgatctggggaattcaccaccctgtgagcacagatgaggccagaaagctgtacgtgaacgacaacccctacaccctggtgtctacaagcagctggagccggaagtacaatctggagatcggcatcagacctggctacaacggccagaaaagctggatgaagatctactggtatctgatgcaccctggcgagagcatcagcttcgagagcaatggaggactgctggcccctaagtacggctacatcatcgaggagtacggcaagggcagaatcttccagagccggatcagaatcgccaagtgtaacaccaagtgccagacatctgtgggcggcatcaacaccaacaagaccttccagaacatcgagagaaacgccctgggagactgccctaagtacatcaagagcggccagctgaaactggccaccggcctgagaaatgtgcctcagagggagaccagaggactgtttggagccatcgccggattcatcgaaggaggatggcctggcctgatcaatggctggtacggcttccagcaccagaatgagcagggagtgggaatggccgccgataaggagtctacccagaaggccatcgaccagatcaccaccaagatcaacaatatcatcgagaagatgaacggcaactacgacagcatcaggggcgagtttagccaggtggagcagcggattaacatgctggccgacaggattgatgatgccgtgaccgatgtgtggagctacaacgccaaactgctggtgctgctggaaaacgacaagaccctggacatgcacgacgccaatgtgagaaacctgcacgaccaggtgaggagagtgctgaaaaccaacgccatcgacgagggcaatggctgttttgagctgctgcacaagtgtaacgacagctgtatggagaccatccggaacggcacctataaccacaccgagtacgaggaggagagcaagctgaagaggcaggagatcgagagcggcagactggtgcctagaggatctcctggcagcggatatattcctgaggcccctagagatggacaggcctatgtgagaaaggatggcgaatgggtgctgctgtctacatttctgggacaccaccatcaccaccattgatgagcggccgctgcagatctgatcctttcctgggacccggcaagaaccaaaaactcactctcttcaaggaaatccgtaatgttaaacccgacacgatgaagcttgtcgttggatggaaaggaaaagagttctacagggaaacttggacccgcttcatggaagacagcttccccattgttaacgaccaagaagtgatggatgttttccttgttgtcaacatgcgtcccactagacccaaccgttgttacaaattcctggcccaacacgctctgcgttgcgaccccgactatgtacctcatgacgtgattaggatcgtcgagccttcatgggtgggcagcaacaacgagtaccgcatcagcctggctaagaagggcggcggctgcccaataatgaaccttcactctgagtacaccaactcgttcgaacagttcatcgatcgtgtcatctgggagaacttctacaagcccatcgtttacatcggtaccgactctgctgaagaggaggaaattctccttgaagtttccctggtgttcaaagtaaaggagtttgcaccagacgcacctctgttcactggtccggcgtattaaaacacgatacattgttattagtacatttattaagcgctagattctgtgcgttgttgatttacagacaattgttgtacgtattttaataattcattaaatttataatctttagggtggtatgttagagcgaaaatcaaatgattttcagcgtctttatatctgaatttaaatattaaatcctcaatagatttgtaaaataggtttcgattagtttcaaacaagggttgtttttccgaaccgatggctggactatctaatggattttcgctcaacgccacaaaacttgccaaatcttgtagcagcaatctagctttgtcgatattcgtttgtgttttgttttgtaataaaggttcgacgtcgttcaaaatattatgcgcttttgtatttctttcatcactgtcgttagtgtacaattgactcgacgtaaacacgttaaataaagcttggacatatttaacatcgggcgtgttagctttattaggccgattatcgtcgtcgtcccaaccctcgtcgttagaagttgcttccgaagacgattttgccatagccacacgacgcctattaattgtgtcggctaacacgtccgcgatcaaatttgtagttgagctttttggaattatttctgattgcgggcgtttttgggcgggtttcaatctaactgtgcccgattttaattcagacaacacgttagaaagcgatggtgcaggcggtggtaacatttcagacggcaaatctactaatggcggcggtggtggagctgatgataaatctaccatcggtggaggcgcaggcggggctggcggcggaggcggaggcggaggtggtggcggtgatgcagacggcggtttaggctcaaatgtctctttaggcaacacagtcggcacctcaactattgtactggtttcgggcgccgtttttggtttgaccggtctgagacgagtgcgatttttttcgtttctaatagcttccaacaattgttgtctgtcgtctaaaggtgcagcgggttgaggttccgtcggcattggtggagcgggcggcaattcagacatcgatggtggtggtggtggtggaggcgctggaatgttaggcacgggagaaggtggtggcggcggtgccgccggtataatttgttctggtttagtttgttcgcgcacgattgtgggcaccggcgcaggcgccgctggctgcacaacggaaggtcgtctgcttcgaggcagcgcttggggtggtggcaattcaatattataattggaatacaaatcgtaaaaatctgctataagcattgtaatttcgctatcgtttaccgtgccgatatttaacaaccgctcaatgtaagcaattgtattgtaaagagattgtctcaagctccgcacgccgataacaagccttttcatttttactacagcattgtagtggcgagacacttcgctgtcgtcgacgtacatgtatgctttgttgtcaaaaacgtcgttggcaagctttaaaatatttaaaagaacatctctgttcagcaccactgtgttgtcgtaaatgttgtttttgataatttgcgcttccgcagtatcgacacgttcaaaaaattgatgcgcatcaattttgttgttcctattattgaataaataagattgtacagattcatatctacgattcgtcatggccaccacaaatgctacgctgcaaacgctggtacaattttacgaaaactgcaaaaacgtcaaaactcggtataaaataatcaacgggcgctttggcaaaatatctattttatcgcacaagcccactagcaaattgtatttgcagaaaacaatttcggcgcacaattttaacgctgacgaaataaaagttcaccagttaatgagcgaccacccaaattttataaaaatctattttaatcacggttccatcaacaaccaagtgatcgtgatggactacattgactgtcccgatttatttgaaacactacaaattaaaggcgagctttcgtaccaacttgttagcaatattattagacagctgtgtgaagcgctcaacgatttgcacaagcacaatttcatacacaacgacataaaactcgaaaatgtcttatatttcgaagcacttgatcgcgtgtatgtttgcgattacggattgtgcaaacacgaaaactcacttagcgtgcacgacggcacgttggagtattttagtccggaaaaaattcgacacacaactatgcacgtttcgtttgactggtacgcggcgtgttaacatacaagttgctaaccggcggttcgtaatcatggtcatagctgtttcctgtgtgaaattgttatccgctcacaattccacacaacatacgagccggaagcataaagtgtaaagcctggggtgcctaatgagtgagctaactcacattaattgcgttgcgctcactgcccgctttccagtcgggaaacctgtcgtgccagctgcattaatgaatcggccaacgcgcggggagaggcggtttgcgtattgggcgctcttccgcttcctcgctcactgactcgctgcgctcggtcgttcggctgcggcgagcggtatcagctcactcaaaggcggtaatacggttatccacagaatcaggggataacgcaggaaagaacatgtgagcaaaaggccagcaaaaggccaggaaccgtaaaaaggccgcgttgctggcgtttttccataggctccgcccccctgacgagcatcacaaaaatcgacgctcaagtcagaggtggcgaaacccgacaggactataaagataccaggcgtttccccctggaagctccctcgtgcgctctcctgttccgaccctgccgcttaccggatacctgtccgcctttctcccttcgggaagcgtggcgctttctcatagctcacgctgtaggtatctcagttcggtgtaggtcgttcgctccaagctgggctgtgtgcacgaaccccccgttcagcccgaccgctgcgccttatccggtaactatcgtcttgagtccaacccggtaagacacgacttatcgccactggcagcagccactggtaacaggattagcagagcgaggtatgtaggcggtgctacagagttcttgaagtggtggcctaactacggctacactagaaggacagtatttggtatctgcgctctgctgaagccagttaccttcggaaaaagagttggtagctcttgatccggcaaacaaaccaccgctggtagcggtggtttttttgtttgcaagcagcagattacgcgcagaaaaaaaggatctcaagaagatcctttgatcttttctacggggtctgacgctcagtggaacgaaaactcacgttaagggattttggtcatgagattatcaaaaaggatcttcacctagatccttttaaattaaaaatgaagttttaaatcaatctaaagtatatatgagtaaacttggtctgacagttaccaatgcttaatcagtgaggcacctatctcagcgatctgtctatttcgttcatccatagttgcctgactccccgtcgtgtagataactacgatacgggagggcttaccatctggccccagtgctgcaatgataccgcgagacccacgctcaccggctccagatttatcagcaataaaccagccagccggaagggccgagcgcagaagtggtcctgcaactttatccgcctccatccagtctattaattgttgccgggaagctagagtaagtagttcgccagttaatagtttgcgcaacgttgttgccattgctacaggcatcgtggtgtcacgctcgtcgtttggtatggcttcattcagctccggttcccaacgatcaaggcgagttacatgatcccccatgttgtgcaaaaaagcggttagctccttcggtcctccgatcgttgtcagaagtaagttggccgcagtgttatcactcatggttatggcagcactgcataattctcttactgtcatgccatccgtaagatgcttttctgtgactggtgagtactcaaccaagtcattctgagaatagtgtatgcggcgaccgagttgctcttgcccggcgtcaatacgggataataccgcgccacatagcagaactttaaaagtgctcatcattggaaaacgttcttcggggcgaaaactctcaaggatcttaccgctgttgagatccagttcgatgtaacccactcgtgcacccaactgatcttcagcatcttttactttcaccagcgtttctgggtgagcaaaaacaggaaggcaaaatgccgcaaaaaagggaataagggcgacacggaaatgttgaatactcatactcttcctttttcaatattattgaagcatttatcagggttattgtctcatgagcggatacatatttgaatgtatttagaaaaataaacaaataggggttccgcgcacatttccccgaaaagtgccacctgacgtctaagaaaccattattatcatgacattaacctataaaaataggcgtatcacgaggccctttcgtctcgcgcgtttcggtgatgacggtgaaaacctctgacacatgcagctcccggagacggtcacagcttgtctgtaagcggatgccgggagcagacaagcccgtcagggcgcgtcagcgggtgttggcgggtgtcggggctggcttaactatgcggcatcagagcagattgtactgagagtgcaccatatgcggtgtgaaataccgcacagatgcgtaaggagaaaataccgcatcaggcgccattcgccattcaggctgcgcaactgttgggaagggcgatcggtgcgggcctcttcgctattacgccagctggcgaaagggggatgtgctgcaaggcgattaagttgggtaacgccagggttttcccagtcacgacgttgtaaaacgacggccagtgcc

SEQ ID NO: 86 - DNA, 11392 bp, Artificial Sequence
  Plasmid DNA: 53508
aagctttactcgtaaagcgagttgaaggatcatatttagttgcgtttatgagataagattgaaagcacgtgtaaaatgtttcccgcgcgttggcacaactatttacaatgcggccaagttataaaagattctaatctgatatgttttaaaacacctttgcggcccgagttgtttgcgtacgtgactagcgaagaagatgtgtggaccgcagaacagatagtaaaacaaaaccctagtattggagcaataatcgatttaaccaacacgtctaaatattatgatggtgtgcattttttgcgggcgggcctgttatacaaaaaaattcaagtacctggccagactttgccgcctgaaagcatagttcaagaatttattgacacggtaaaagaatttacagaaaagtgtcccggcatgttggtgggcgtgcactgcacacacggtattaatcgcaccggttacatggtgtgcagatatttaatgcacaccctgggtattgcgccgcaggaagccatagatagattcgaaaaagccagaggtcacaaaattgaaagacaaaattacgttcaagatttattaatttaattaatattatttgcattctttaacaaatactttatcctattttcaaattgttgcgcttcttccagcgaaccaaaactatgcttcgcttgctccgtttagcttgtagccgatcagtggcgttgttccaatcgacggtaggattaggccggatattctccaccacaatgttggcaacgttgatgttacgtttatgcttttggttttccacgtacgtcttttggccggtaatagccgtaaacgtagtgccgtcgcgcgtcacgcacaacaccggatgtttgcgcttgtccgcggggtattgaaccgcgcgatccgacaaatccaccactttggcaactaaatcggtgacctgcgcgtcttttttctgcattatttcgtctttcttttgcatggtttcctggaagccggtgtacatgcggtttagatcagtcatgacgcgcgtgacctgcaaatctttggcctcgatctgcttgtccttgatggcaacgatgcgttcaataaactcttgttttttaacaagttcctcggttttttgcgccaccaccgcttgcagcgcgtttgtgtgctcggtgaatgtcgcaatcagcttagtcaccaactgtttgctctcctcctcccgttgtttgatcgcgggatcgtacttgccggtgcagagcacttgaggaattacttcttctaaaagccattcttgtaattctatggcgtaaggcaatttggacttcataatcagctgaatcacgccggatttagtaatgagcactgtatgcggctgcaaatacagcgggtcgccccttttcacgacgctgttagaggtagggcccccattttggatggtctgctcaaataacgatttgtatttattgtctacatgaacacgtatagctttatcacaaactgtatattttaaactgttagcgacgtccttggccacgaaccggacctgttggtcgcgctctagcacgtaccgcaggttgaacgtatcttctccaaatttaaattctccaattttaacgcgagccattttgatacacgtgtgtcgattttgcaacaactattgttttttaacgcaaactaaacttattgtggtaagcaataattaaatatgggggaacatgcgccgctacaacactcgtcgttatgaacgcagacggcgccggtctcggcgcaagcggctaaaacgtgttgcgcgttcaacgcggcaaacatcgcaaaagccaatagtacagttttgatttgcatattaacggcgattttttaaattatcttatttaataaatagttatgacgcctacaactccccgcccgcgttgactcgctgcacctcgagcagttcgttgacgccttcctccgtgtggccgaacacgtcgagcgggtggtcgatgaccagcggcgtgccgcacgcgacgcacaagtatctgtacaccgaatgatcgtcgggcgaaggcacgtcggcctccaagtggcaatattggcaaattcgaaaatatatacagttgggttgtttgcgcatatctatcgtggcgttgggcatgtacgtccgaacgttgatttgcatgcaagccgaaattaaatcattgcgattagtgcgattaaaacgttgtacatcctcgcttttaatcatgccgtcgattaaatcgcgcaatcgagtcaagtgatcaaagtgtggaataatgttttctttgtattcccgagtcaagcgcagcgcgtattttaacaaactagccatcttgtaagttagtttcatttaatgcaactttatccaataatatattatgtatcgcacgtcaagaattaacaatgcgcccgttgtcgcatctcaacacgactatgatagagatcaaataaagcgcgaattaaatagcttgcgacgcaacgtgcacgatctgtgcacgcgttccggcacgagctttgattgtaataagtttttacgaagcgatgacatgacccccgtagtgacaacgatcacgcccaaaagaactgccgactacaaaattaccgagtatgtcggtgacgttaaaactattaagccatccaatcgaccgttagtcgaatcaggaccgctggtgcgagaagccgcgaagtatggcgaatgcatcgtataacgtgtggagtccgctcattagagcgtcatgtttagacaagaaagctacatatttaattgatcccgatgattttattgataaattgaccctaactccatacacggtattctacaatggcggggttttggtcaaaatttccggactgcgattgtacatgctgttaacggctccgcccactattaatgaaattaaaaattccaattttaaaaaacgcagcaagagaaacatttgtatgaaagaatgcgtagaaggaaagaaaaatgtcgtcgacatgctgaacaacaagattaatatgcctccgtgtataaaaaaaatattgaacgatttgaaagaaaacaatgtaccgcgcggcggtatgtacaggaagaggtttatactaaactgttacattgcaaacgtggtttcgtgtgccaagtgtgaaaaccgatgtttaatcaaggctctgacgcatttctacaaccacgactccaagtgtgtgggtgaagtcatgcatcttttaatcaaatcccaagatgtgtataaaccaccaaactgccaaaaaatgaaaactgtcgacaagctctgtccgtttgctggcaactgcaagggtctcaatcctatttgtaattattgaataataaaacaattataaatgctaaatttgttttttattaacgatacaaaccaaacgcaacaagaacatttgtagtattatctataattgaaaacgcgtagttataatcgctgaggtaatatttaaaatcattttcaaatgattcacagttaatttgcgacaatataattttattttcacataaactagacgccttgtcgtcttcttcttcgtattccttctctttttcatttttctcctcataaaaattaacatagttattatcgtatccatatatgtatctatcgtatagagtaaattttttgttgtcataaatatatatgtcttttttaatggggtgtatagtaccgctgcgcatagtttttctgtaatttacaacagtgctattttctggtagttcttcggagtgtgttgctttaattattaaatttatataatcaatgaatttgggatcgtcggttttgtacaatatgttgccggcatagtacgcagcttcttctagttcaattacaccattttttagcagcaccggattaacataactttccaaaatgttgtacgaaccgttaaacaaaaacagttcacctcccttttctatactattgtctgcgagcagttgtttgttgttaaaaataacagccattgtaatgagacgcacaaactaatatcacaaactggaaatgtctatcaatatatagttgctgatatcatggagataattaaaatgataaccatctcgcaaataaataagtattttactgttttcgtaacagttttgtaataaaaaaacctataaatattccggattattcataccgtcccaccatcgggcgcggatctatgctactagtaaatcagtcacaccaaggcttcaataaggaacacacaagcaagatggtaagcgctattgttttatatgtgcttttggcggcggcggcgcattctgcctttgcggcggatcccggggacaagatctgtatcggctaccacgccaacaatagcaccacccaggtggacacaatcctggagaagaacgtgaccgtgacacactctgtggagctgctggagaaccagaaggaggagcggttctgtaaggtgctgaacagagcccctctggatctgaggagctgtacaatcgagggctggattctgggcaaccccagatgtgatctgctgctgggcgatcagtggtggagctacatcgtggagagacccacagcccagaatggcatctgttaccccggcgtgctgaatgatgtggaggagctgaaggccctgatcggcagcggagagaaggtggagagattcgagatgttccccaagtctacatgggccggagtggatacaaatagcggcgtgtccagcgcctgtccttacaccaccggcagcagcttctacagaaacctgctgtggatcatcaagacccgcagcagcgcctatcctgtgatcaggggcacctacaacaacaccggcaaccagcccatcctgtacttttggggcgtgcaccaccctccagataccaacgagcagaacaccctgtacggcagcggcgacagatatgtgagaatgggcaccgagaggatgaatttcgccaagggccctgaaattgccgccagacctgccgtgaatggccagagaggccggatcgattactactggagcgtgctgaagcctggcgagacactgaacgtggagagcaacggcaatctgatcgccccttggtacgcctacagattcgtgtccaccgatagaaagggcgccgtgttcaagagcaacctgcccatcgagaactgtgatgccacctgtcagacaattgccggggtgctgaggaccaataagaccttccagaacgtgtcccctctgtggatcggcgagtgccctaagtatgtgaagagcgagagcctgagactggccacaggcctgagaaacatcccccagagagagaccagaggactgtttggagccatcgccggattcatcgagggaggatggaccggaatgatcgatggctggtacggctaccaccacgagaatagccagggctctggatatgccgccgatagagagtctacccagaaggccatcgacggcatcaccaacaaggtgaacagcatcatcgacaagatgaacacccagttcgaggccgtggatcacgagttcagcaacctggagcggagaatcgacaacctgaacaagaggatggaggacggctttctggatgtgtggacctacaatgccgagctgctgatcctgctggaaaacgagaggaccctggacatgcacgacgccaacgtgaagaacctgtacgagaaggtgaagagccagctgagagacaacgccaacgatctgggcaatggctgcttcgagttctggcacaagtgtgacaacgactgtatcgagagcgtgaagaacggcacctataactaccccaagtaccaggccgagagcagactgaacaggcagaccatcgagagcggcagactggtgcctagaggatctcctggcagcggatatattcctgaggcccctagagatggacaggcctatgtgagaaaggatggcgaatgggtgctgctgtctacatttctgggacaccaccatcaccaccattgatgagcggccgctgcagatctgatcctttcctgggacccggcaagaaccaaaaactcactctcttcaaggaaatccgtaatgttaaacccgacacgatgaagcttgtcgttggatggaaaggaaaagagttctacagggaaacttggacccgcttcatggaagacagcttccccattgttaacgaccaagaagtgatggatgttttccttgttgtcaacatgcgtcccactagacccaaccgttgttacaaattcctggcccaacacgctctgcgttgcgaccccgactatgtacctcatgacgtgattaggatcgtcgagccttcatgggtgggcagcaacaacgagtaccgcatcagcctggctaagaagggcggcggctgcccaataatgaaccttcactctgagtacaccaactcgttcgaacagttcatcgatcgtgtcatctgggagaacttctacaagcccatcgtttacatcggtaccgactctgctgaagaggaggaaattctccttgaagtttccctggtgttcaaagtaaaggagtttgcaccagacgcacctctgttcactggtccggcgtattaaaacacgatacattgttattagtacatttattaagcgctagattctgtgcgttgttgatttacagacaattgttgtacgtattttaataattcattaaatttataatctttagggtggtatgttagagcgaaaatcaaatgattttcagcgtctttatatctgaatttaaatattaaatcctcaatagatttgtaaaataggtttcgattagtttcaaacaagggttgtttttccgaaccgatggctggactatctaatggattttcgctcaacgccacaaaacttgccaaatcttgtagcagcaatctagctttgtcgatattcgtttgtgttttgttttgtaataaaggttcgacgtcgttcaaaatattatgcgcttttgtatttctttcatcactgtcgttagtgtacaattgactcgacgtaaacacgttaaataaagcttggacatatttaacatcgggcgtgttagctttattaggccgattatcgtcgtcgtcccaaccctcgtcgttagaagttgcttccgaagacgattttgccatagccacacgacgcctattaattgtgtcggctaacacgtccgcgatcaaatttgtagttgagctttttggaattatttctgattgcgggcgtttttgggcgggtttcaatctaactgtgcccgattttaattcagacaacacgttagaaagcgatggtgcaggcggtggtaacatttcagacggcaaatctactaatggcggcggtggtggagctgatgataaatctaccatcggtggaggcgcaggcggggctggcggcggaggcggaggcggaggtggtggcggtgatgcagacggcggtttaggctcaaatgtctctttaggcaacacagtcggcacctcaactattgtactggtttcgggcgccgtttttggtttgaccggtctgagacgagtgcgatttttttcgtttctaatagcttccaacaattgttgtctgtcgtctaaaggtgcagcgggttgaggttccgtcggcattggtggagcgggcggcaattcagacatcgatggtggtggtggtggtggaggcgctggaatgttaggcacgggagaaggtggtggcggcggtgccgccggtataatttgttctggtttagtttgttcgcgcacgattgtgggcaccggcgcaggcgccgctggctgcacaacggaaggtcgtctgcttcgaggcagcgcttggggtggtggcaattcaatattataattggaatacaaatcgtaaaaatctgctataagcattgtaatttcgctatcgtttaccgtgccgatatttaacaaccgctcaatgtaagcaattgtattgtaaagagattgtctcaagctccgcacgccgataacaagccttttcatttttactacagcattgtagtggcgagacacttcgctgtcgtcgacgtacatgtatgctttgttgtcaaaaacgtcgttggcaagctttaaaatatttaaaagaacatctctgttcagcaccactgtgttgtcgtaaatgttgtttttgataatttgcgcttccgcagtatcgacacgttcaaaaaattgatgcgcatcaattttgttgttcctattattgaataaataagattgtacagattcatatctacgattcgtcatggccaccacaaatgctacgctgcaaacgctggtacaattttacgaaaactgcaaaaacgtcaaaactcggtataaaataatcaacgggcgctttggcaaaatatctattttatcgcacaagcccactagcaaattgtatttgcagaaaacaatttcggcgcacaattttaacgctgacgaaataaaagttcaccagttaatgagcgaccacccaaattttataaaaatctattttaatcacggttccatcaacaaccaagtgatcgtgatggactacattgactgtcccgatttatttgaaacactacaaattaaaggcgagctttcgtaccaacttgttagcaatattattagacagctgtgtgaagcgctcaacgatttgcacaagcacaatttcatacacaacgacataaaactcgaaaatgtcttatatttcgaagcacttgatcgcgtgtatgtttgcgattacggattgtgcaaacacgaaaactcacttagcgtgcacgacggcacgttggagtattttagtccggaaaaaattcgacacacaactatgcacgtttcgtttgactggtacgcggcgtgttaacatacaagttgctaaccggcggttcgtaatcatggtcatagctgtttcctgtgtgaaattgttatccgctcacaattccacacaacatacgagccggaagcataaagtgtaaagcctggggtgcctaatgagtgagctaactcacattaattgcgttgcgctcactgcccgctttccagtcgggaaacctgtcgtgccagctgcattaatgaatcggccaacgcgcggggagaggcggtttgcgtattgggcgctcttccgcttcctcgctcactgactcgctgcgctcggtcgttcggctgcggcgagcggtatcagctcactcaaaggcggtaatacggttatccacagaatcaggggataacgcaggaaagaacatgtgagcaaaaggccagcaaaaggccaggaaccgtaaaaaggccgcgttgctggcgtttttccataggctccgcccccctgacgagcatcacaaaaatcgacgctcaagtcagaggtggcgaaacccgacaggactataaagataccaggcgtttccccctggaagctccctcgtgcgctctcctgttccgaccctgccgcttaccggatacctgtccgcctttctcccttcgggaagcgtggcgctttctcatagctcacgctgtaggtatctcagttcggtgtaggtcgttcgctccaagctgggctgtgtgcacgaaccccccgttcagcccgaccgctgcgccttatccggtaactatcgtcttgagtccaacccggtaagacacgacttatcgccactggcagcagccactggtaacaggattagcagagcgaggtatgtaggcggtgctacagagttcttgaagtggtggcctaactacggctacactagaaggacagtatttggtatctgcgctctgctgaagccagttaccttcggaaaaagagttggtagctcttgatccggcaaacaaaccaccgctggtagcggtggtttttttgtttgcaagcagcagattacgcgcagaaaaaaaggatctcaagaagatcctttgatcttttctacggggtctgacgctcagtggaacgaaaactcacgttaagggattttggtcatgagattatcaaaaaggatcttcacctagatccttttaaattaaaaatgaagttttaaatcaatctaaagtatatatgagtaaacttggtctgacagttaccaatgcttaatcagtgaggcacctatctcagcgatctgtctatttcgttcatccatagttgcctgactccccgtcgtgtagataactacgatacgggagggcttaccatctggccccagtgctgcaatgataccgcgagacccacgctcaccggctccagatttatcagcaataaaccagccagccggaagggccgagcgcagaagtggtcctgcaactttatccgcctccatccagtctattaattgttgccgggaagctagagtaagtagttcgccagttaatagtttgcgcaacgttgttgccattgctacaggcatcgtggtgtcacgctcgtcgtttggtatggcttcattcagctccggttcccaacgatcaaggcgagttacatgatcccccatgttgtgcaaaaaagcggttagctccttcggtcctccgatcgttgtcagaagtaagttggccgcagtgttatcactcatggttatggcagcactgcataattctcttactgtcatgccatccgtaagatgcttttctgtgactggtgagtactcaaccaagtcattctgagaatagtgtatgcggcgaccgagttgctcttgcccggcgtcaatacgggataataccgcgccacatagcagaactttaaaagtgctcatcattggaaaacgttcttcggggcgaaaactctcaaggatcttaccgctgttgagatccagttcgatgtaacccactcgtgcacccaactgatcttcagcatcttttactttcaccagcgtttctgggtgagcaaaaacaggaaggcaaaatgccgcaaaaaagggaataagggcgacacggaaatgttgaatactcatactcttcctttttcaatattattgaagcatttatcagggttattgtctcatgagcggatacatatttgaatgtatttagaaaaataaacaaataggggttccgcgcacatttccccgaaaagtgccacctgacgtctaagaaaccattattatcatgacattaacctataaaaataggcgtatcacgaggccctttcgtctcgcgcgtttcggtgatgacggtgaaaacctctgacacatgcagctcccggagacggtcacagcttgtctgtaagcggatgccgggagcagacaagcccgtcagggcgcgtcagcgggtgttggcgggtgtcggggctggcttaactatgcggcatcagagcagattgtactgagagtgcaccatatgcggtgtgaaataccgcacagatgcgtaaggagaaaataccgcatcaggcgccattcgccattcaggctgcgcaactgttgggaagggcgatcggtgcgggcctcttcgctattacgccagctggcgaaagggggatgtgctgcaaggcgattaagttgggtaacgccagggttttcccagtcacgacgttgtaaaacgacggccagtgcc

SEQ ID NO: 87 - DNA, 11383 bp, Artificial Sequence
  Plasmid DNA: 53511
aagctttactcgtaaagcgagttgaaggatcatatttagttgcgtttatgagataagattgaaagcacgtgtaaaatgtttcccgcgcgttggcacaactatttacaatgcggccaagttataaaagattctaatctgatatgttttaaaacacctttgcggcccgagttgtttgcgtacgtgactagcgaagaagatgtgtggaccgcagaacagatagtaaaacaaaaccctagtattggagcaataatcgatttaaccaacacgtctaaatattatgatggtgtgcattttttgcgggcgggcctgttatacaaaaaaattcaagtacctggccagactttgccgcctgaaagcatagttcaagaatttattgacacggtaaaagaatttacagaaaagtgtcccggcatgttggtgggcgtgcactgcacacacggtattaatcgcaccggttacatggtgtgcagatatttaatgcacaccctgggtattgcgccgcaggaagccatagatagattcgaaaaagccagaggtcacaaaattgaaagacaaaattacgttcaagatttattaatttaattaatattatttgcattctttaacaaatactttatcctattttcaaattgttgcgcttcttccagcgaaccaaaactatgcttcgcttgctccgtttagcttgtagccgatcagtggcgttgttccaatcgacggtaggattaggccggatattctccaccacaatgttggcaacgttgatgttacgtttatgcttttggttttccacgtacgtcttttggccggtaatagccgtaaacgtagtgccgtcgcgcgtcacgcacaacaccggatgtttgcgcttgtccgcggggtattgaaccgcgcgatccgacaaatccaccactttggcaactaaatcggtgacctgcgcgtcttttttctgcattatttcgtctttcttttgcatggtttcctggaagccggtgtacatgcggtttagatcagtcatgacgcgcgtgacctgcaaatctttggcctcgatctgcttgtccttgatggcaacgatgcgttcaataaactcttgttttttaacaagttcctcggttttttgcgccaccaccgcttgcagcgcgtttgtgtgctcggtgaatgtcgcaatcagcttagtcaccaactgtttgctctcctcctcccgttgtttgatcgcgggatcgtacttgccggtgcagagcacttgaggaattacttcttctaaaagccattcttgtaattctatggcgtaaggcaatttggacttcataatcagctgaatcacgccggatttagtaatgagcactgtatgcggctgcaaatacagcgggtcgccccttttcacgacgctgttagaggtagggcccccattttggatggtctgctcaaataacgatttgtatttattgtctacatgaacacgtatagctttatcacaaactgtatattttaaactgttagcgacgtccttggccacgaaccggacctgttggtcgcgctctagcacgtaccgcaggttgaacgtatcttctccaaatttaaattctccaattttaacgcgagccattttgatacacgtgtgtcgattttgcaacaactattgttttttaacgcaaactaaacttattgtggtaagcaataattaaatatgggggaacatgcgccgctacaacactcgtcgttatgaacgcagacggcgccggtctcggcgcaagcggctaaaacgtgttgcgcgttcaacgcggcaaacatcgcaaaagccaatagtacagttttgatttgcatattaacggcgattttttaaattatcttatttaataaatagttatgacgcctacaactccccgcccgcgttgactcgctgcacctcgagcagttcgttgacgccttcctccgtgtggccgaacacgtcgagcgggtggtcgatgaccagcggcgtgccgcacgcgacgcacaagtatctgtacaccgaatgatcgtcgggcgaaggcacgtcggcctccaagtggcaatattggcaaattcgaaaatatatacagttgggttgtttgcgcatatctatcgtggcgttgggcatgtacgtccgaacgttgatttgcatgcaagccgaaattaaatcattgcgattagtgcgattaaaacgttgtacatcctcgcttttaatcatgccgtcgattaaatcgcgcaatcgagtcaagtgatcaaagtgtggaataatgttttctttgtattcccgagtcaagcgcagcgcgtattttaacaaactagccatcttgtaagttagtttcatttaatgcaactttatccaataatatattatgtatcgcacgtcaagaattaacaatgcgcccgttgtcgcatctcaacacgactatgatagagatcaaataaagcgcgaattaaatagcttgcgacgcaacgtgcacgatctgtgcacgcgttccggcacgagctttgattgtaataagtttttacgaagcgatgacatgacccccgtagtgacaacgatcacgcccaaaagaactgccgactacaaaattaccgagtatgtcggtgacgttaaaactattaagccatccaatcgaccgttagtcgaatcaggaccgctggtgcgagaagccgcgaagtatggcgaatgcatcgtataacgtgtggagtccgctcattagagcgtcatgtttagacaagaaagctacatatttaattgatcccgatgattttattgataaattgaccctaactccatacacggtattctacaatggcggggttttggtcaaaatttccggactgcgattgtacatgctgttaacggctccgcccactattaatgaaattaaaaattccaattttaaaaaacgcagcaagagaaacatttgtatgaaagaatgcgtagaaggaaagaaaaatgtcgtcgacatgctgaacaacaagattaatatgcctccgtgtataaaaaaaatattgaacgatttgaaagaaaacaatgtaccgcgcggcggtatgtacaggaagaggtttatactaaactgttacattgcaaacgtggtttcgtgtgccaagtgtgaaaaccgatgtttaatcaaggctctgacgcatttctacaaccacgactccaagtgtgtgggtgaagtcatgcatcttttaatcaaatcccaagatgtgtataaaccaccaaactgccaaaaaatgaaaactgtcgacaagctctgtccgtttgctggcaactgcaagggtctcaatcctatttgtaattattgaataataaaacaattataaatgctaaatttgttttttattaacgatacaaaccaaacgcaacaagaacatttgtagtattatctataattgaaaacgcgtagttataatcgctgaggtaatatttaaaatcattttcaaatgattcacagttaatttgcgacaatataattttattttcacataaactagacgccttgtcgtcttcttcttcgtattccttctctttttcatttttctcctcataaaaattaacatagttattatcgtatccatatatgtatctatcgtatagagtaaattttttgttgtcataaatatatatgtcttttttaatggggtgtatagtaccgctgcgcatagtttttctgtaatttacaacagtgctattttctggtagttcttcggagtgtgttgctttaattattaaatttatataatcaatgaatttgggatcgtcggttttgtacaatatgttgccggcatagtacgcagcttcttctagttcaattacaccattttttagcagcaccggattaacataactttccaaaatgttgtacgaaccgttaaacaaaaacagttcacctcccttttctatactattgtctgcgagcagttgtttgttgttaaaaataacagccattgtaatgagacgcacaaactaatatcacaaactggaaatgtctatcaatatatagttgctgatatcatggagataattaaaatgataaccatctcgcaaataaataagtattttactgttttcgtaacagttttgtaataaaaaaacctataaatattccggattattcataccgtcccaccatcgggcgcggatctatgctactagtaaatcagtcacaccaaggcttcaataaggaacacacaagcaagatggtaagcgctattgttttatatgtgcttttggcggcggcggcgcattctgcctttgcggcggatcccggggaccagatctgtatcggctaccacgccaacaatagcaccgagaaggtggacaccatcctggagagaaacgtgacagtgacccacgccaaggacatcctggaaaagacccacaacggcaagctgtgtaagctgaacggcatccctcctctggaactgggcgattgttctatcgccggatggctgctgggaaaccccgagtgtgataggctgctgtctgtgcctgagtggagctacatcatggagaaggagaaccctagggacggcctgtgttaccctggcagcttcaacgattacgaggagctgaagcacctgctgtctagcgtgaagcacttcgagaaggtgaagatcctgcccaaggacagatggacccagcacacaacaacaggaggaagcagagcctgcgccgtgtctggcaaccccagcttcttccggaatatggtgtggctgaccaagaagggcagcaattaccctgtggcccagggcagctacaataataccagcggcgagcagatgctgatcatctggggagtgcaccaccctaatgacgagaccgagcagagaaccctgtaccagaatgtgggcacctacgtgtctgtgggcaccagcaccctgaataagagaagcacccccgagattgccacaagacccaaggtgaacggccagggaggaagaatggagttcagctggaccctgctggatatgtgggacaccatcaactttgagagcaccggcaatctgatcgcccctgagtacggcttcaagatcagcaagagaggcagcagcggcatcatgaaaaccgagggcaccctggagaattgtgagaccaagtgccagacacctctgggcgccatcaataccaccctgcccttccacaatgtgcaccctctgaccatcggcgagtgccctaagtatgtgaagagcgagaagctggtgctggccacaggactgagaaacgtgccccagagagagacaagaggcctgtttggagccatcgccggattcatcgagggaggatggcagggaatggtcgatggctggtacggctaccaccacagcaatgatcagggctctggctatgccgccgataaggagtctacccagaaggcctttgacggcatcaccaacaaggtgaacagcgtgatcgagaagatgaacacccagtttgaggctgtgggcaaggagtttagcaacctggagcggagactggagaacctgaacaagaagatggaggacggcttcctggatgtgtggacctacaatgccgaactgctggtgctgatggagaatgagcggaccctggacttccacgacagcaacgtgaagaacctgtacgacaaagtgaggatgcagctgagggacaacgtgaaggaactgggcaatggctgcttcgagttctaccacaagtgtgacgacgagtgtatgaactccgtgaagaacggcacctacgactaccctaagtacgaggaggagagcaagctgaaccggaacgagatcaagagcggcagactggtgcctagaggatctcctggcagcggatatattcctgaggcccctagagatggacaggcctatgtgagaaaggatggcgaatgggtgctgctgtctacatttctgggacaccaccatcaccaccattgatgagcggccgctgcagatctgatcctttcctgggacccggcaagaaccaaaaactcactctcttcaaggaaatccgtaatgttaaacccgacacgatgaagcttgtcgttggatggaaaggaaaagagttctacagggaaacttggacccgcttcatggaagacagcttccccattgttaacgaccaagaagtgatggatgttttccttgttgtcaacatgcgtcccactagacccaaccgttgttacaaattcctggcccaacacgctctgcgttgcgaccccgactatgtacctcatgacgtgattaggatcgtcgagccttcatgggtgggcagcaacaacgagtaccgcatcagcctggctaagaagggcggcggctgcccaataatgaaccttcactctgagtacaccaactcgttcgaacagttcatcgatcgtgtcatctgggagaacttctacaagcccatcgtttacatcggtaccgactctgctgaagaggaggaaattctccttgaagtttccctggtgttcaaagtaaaggagtttgcaccagacgcacctctgttcactggtccggcgtattaaaacacgatacattgttattagtacatttattaagcgctagattctgtgcgttgttgatttacagacaattgttgtacgtattttaataattcattaaatttataatctttagggtggtatgttagagcgaaaatcaaatgattttcagcgtctttatatctgaatttaaatattaaatcctcaatagatttgtaaaataggtttcgattagtttcaaacaagggttgtttttccgaaccgatggctggactatctaatggattttcgctcaacgccacaaaacttgccaaatcttgtagcagcaatctagctttgtcgatattcgtttgtgttttgttttgtaataaaggttcgacgtcgttcaaaatattatgcgcttttgtatttctttcatcactgtcgttagtgtacaattgactcgacgtaaacacgttaaataaagcttggacatatttaacatcgggcgtgttagctttattaggccgattatcgtcgtcgtcccaaccctcgtcgttagaagttgcttccgaagacgattttgccatagccacacgacgcctattaattgtgtcggctaacacgtccgcgatcaaatttgtagttgagctttttggaattatttctgattgcgggcgtttttgggcgggtttcaatctaactgtgcccgattttaattcagacaacacgttagaaagcgatggtgcaggcggtggtaacatttcagacggcaaatctactaatggcggcggtggtggagctgatgataaatctaccatcggtggaggcgcaggcggggctggcggcggaggcggaggcggaggtggtggcggtgatgcagacggcggtttaggctcaaatgtctctttaggcaacacagtcggcacctcaactattgtactggtttcgggcgccgtttttggtttgaccggtctgagacgagtgcgatttttttcgtttctaatagcttccaacaattgttgtctgtcgtctaaaggtgcagcgggttgaggttccgtcggcattggtggagcgggcggcaattcagacatcgatggtggtggtggtggtggaggcgctggaatgttaggcacgggagaaggtggtggcggcggtgccgccggtataatttgttctggtttagtttgttcgcgcacgattgtgggcaccggcgcaggcgccgctggctgcacaacggaaggtcgtctgcttcgaggcagcgcttggggtggtggcaattcaatattataattggaatacaaatcgtaaaaatctgctataagcattgtaatttcgctatcgtttaccgtgccgatatttaacaaccgctcaatgtaagcaattgtattgtaaagagattgtctcaagctccgcacgccgataacaagccttttcatttttactacagcattgtagtggcgagacacttcgctgtcgtcgacgtacatgtatgctttgttgtcaaaaacgtcgttggcaagctttaaaatatttaaaagaacatctctgttcagcaccactgtgttgtcgtaaatgttgtttttgataatttgcgcttccgcagtatcgacacgttcaaaaaattgatgcgcatcaattttgttgttcctattattgaataaataagattgtacagattcatatctacgattcgtcatggccaccacaaatgctacgctgcaaacgctggtacaattttacgaaaactgcaaaaacgtcaaaactcggtataaaataatcaacgggcgctttggcaaaatatctattttatcgcacaagcccactagcaaattgtatttgcagaaaacaatttcggcgcacaattttaacgctgacgaaataaaagttcaccagttaatgagcgaccacccaaattttataaaaatctattttaatcacggttccatcaacaaccaagtgatcgtgatggactacattgactgtcccgatttatttgaaacactacaaattaaaggcgagctttcgtaccaacttgttagcaatattattagacagctgtgtgaagcgctcaacgatttgcacaagcacaatttcatacacaacgacataaaactcgaaaatgtcttatatttcgaagcacttgatcgcgtgtatgtttgcgattacggattgtgcaaacacgaaaactcacttagcgtgcacgacggcacgttggagtattttagtccggaaaaaattcgacacacaactatgcacgtttcgtttgactggtacgcggcgtgttaacatacaagttgctaaccggcggttcgtaatcatggtcatagctgtttcctgtgtgaaattgttatccgctcacaattccacacaacatacgagccggaagcataaagtgtaaagcctggggtgcctaatgagtgagctaactcacattaattgcgttgcgctcactgcccgctttccagtcgggaaacctgtcgtgccagctgcattaatgaatcggccaacgcgcggggagaggcggtttgcgtattgggcgctcttccgcttcctcgctcactgactcgctgcgctcggtcgttcggctgcggcgagcggtatcagctcactcaaaggcggtaatacggttatccacagaatcaggggataacgcaggaaagaacatgtgagcaaaaggccagcaaaaggccaggaaccgtaaaaaggccgcgttgctggcgtttttccataggctccgcccccctgacgagcatcacaaaaatcgacgctcaagtcagaggtggcgaaacccgacaggactataaagataccaggcgtttccccctggaagctccctcgtgcgctctcctgttccgaccctgccgcttaccggatacctgtccgcctttctcccttcgggaagcgtggcgctttctcatagctcacgctgtaggtatctcagttcggtgtaggtcgttcgctccaagctgggctgtgtgcacgaaccccccgttcagcccgaccgctgcgccttatccggtaactatcgtcttgagtccaacccggtaagacacgacttatcgccactggcagcagccactggtaacaggattagcagagcgaggtatgtaggcggtgctacagagttcttgaagtggtggcctaactacggctacactagaaggacagtatttggtatctgcgctctgctgaagccagttaccttcggaaaaagagttggtagctcttgatccggcaaacaaaccaccgctggtagcggtggtttttttgtttgcaagcagcagattacgcgcagaaaaaaaggatctcaagaagatcctttgatcttttctacggggtctgacgctcagtggaacgaaaactcacgttaagggattttggtcatgagattatcaaaaaggatcttcacctagatccttttaaattaaaaatgaagttttaaatcaatctaaagtatatatgagtaaacttggtctgacagttaccaatgcttaatcagtgaggcacctatctcagcgatctgtctatttcgttcatccatagttgcctgactccccgtcgtgtagataactacgatacgggagggcttaccatctggccccagtgctgcaatgataccgcgagacccacgctcaccggctccagatttatcagcaataaaccagccagccggaagggccgagcgcagaagtggtcctgcaactttatccgcctccatccagtctattaattgttgccgggaagctagagtaagtagttcgccagttaatagtttgcgcaacgttgttgccattgctacaggcatcgtggtgtcacgctcgtcgtttggtatggcttcattcagctccggttcccaacgatcaaggcgagttacatgatcccccatgttgtgcaaaaaagcggttagctccttcggtcctccgatcgttgtcagaagtaagttggccgcagtgttatcactcatggttatggcagcactgcataattctcttactgtcatgccatccgtaagatgcttttctgtgactggtgagtactcaaccaagtcattctgagaatagtgtatgcggcgaccgagttgctcttgcccggcgtcaatacgggataataccgcgccacatagcagaactttaaaagtgctcatcattggaaaacgttcttcggggcgaaaactctcaaggatcttaccgctgttgagatccagttcgatgtaacccactcgtgcacccaactgatcttcagcatcttttactttcaccagcgtttctgggtgagcaaaaacaggaaggcaaaatgccgcaaaaaagggaataagggcgacacggaaatgttgaatactcatactcttcctttttcaatattattgaagcatttatcagggttattgtctcatgagcggatacatatttgaatgtatttagaaaaataaacaaataggggttccgcgcacatttccccgaaaagtgccacctgacgtctaagaaaccattattatcatgacattaacctataaaaataggcgtatcacgaggccctttcgtctcgcgcgtttcggtgatgacggtgaaaacctctgacacatgcagctcccggagacggtcacagcttgtctgtaagcggatgccgggagcagacaagcccgtcagggcgcgtcagcgggtgttggcgggtgtcggggctggcttaactatgcggcatcagagcagattgtactgagagtgcaccatatgcggtgtgaaataccgcacagatgcgtaaggagaaaataccgcatcaggcgccattcgccattcaggctgcgcaactgttgggaagggcgatcggtgcgggcctcttcgctattacgccagctggcgaaagggggatgtgctgcaaggcgattaagttgggtaacgccagggttttcccagtcacgacgttgtaaaacgacggccagtgcc

SEQ ID NO: 88 - DNA, 11386 bp, Artificial Sequence
  Plasmid DNA: 53512
aagctttactcgtaaagcgagttgaaggatcatatttagttgcgtttatgagataagattgaaagcacgtgtaaaatgtttcccgcgcgttggcacaactatttacaatgcggccaagttataaaagattctaatctgatatgttttaaaacacctttgcggcccgagttgtttgcgtacgtgactagcgaagaagatgtgtggaccgcagaacagatagtaaaacaaaaccctagtattggagcaataatcgatttaaccaacacgtctaaatattatgatggtgtgcattttttgcgggcgggcctgttatacaaaaaaattcaagtacctggccagactttgccgcctgaaagcatagttcaagaatttattgacacggtaaaagaatttacagaaaagtgtcccggcatgttggtgggcgtgcactgcacacacggtattaatcgcaccggttacatggtgtgcagatatttaatgcacaccctgggtattgcgccgcaggaagccatagatagattcgaaaaagccagaggtcacaaaattgaaagacaaaattacgttcaagatttattaatttaattaatattatttgcattctttaacaaatactttatcctattttcaaattgttgcgcttcttccagcgaaccaaaactatgcttcgcttgctccgtttagcttgtagccgatcagtggcgttgttccaatcgacggtaggattaggccggatattctccaccacaatgttggcaacgttgatgttacgtttatgcttttggttttccacgtacgtcttttggccggtaatagccgtaaacgtagtgccgtcgcgcgtcacgcacaacaccggatgtttgcgcttgtccgcggggtattgaaccgcgcgatccgacaaatccaccactttggcaactaaatcggtgacctgcgcgtcttttttctgcattatttcgtctttcttttgcatggtttcctggaagccggtgtacatgcggtttagatcagtcatgacgcgcgtgacctgcaaatctttggcctcgatctgcttgtccttgatggcaacgatgcgttcaataaactcttgttttttaacaagttcctcggttttttgcgccaccaccgcttgcagcgcgtttgtgtgctcggtgaatgtcgcaatcagcttagtcaccaactgtttgctctcctcctcccgttgtttgatcgcgggatcgtacttgccggtgcagagcacttgaggaattacttcttctaaaagccattcttgtaattctatggcgtaaggcaatttggacttcataatcagctgaatcacgccggatttagtaatgagcactgtatgcggctgcaaatacagcgggtcgccccttttcacgacgctgttagaggtagggcccccattttggatggtctgctcaaataacgatttgtatttattgtctacatgaacacgtatagctttatcacaaactgtatattttaaactgttagcgacgtccttggccacgaaccggacctgttggtcgcgctctagcacgtaccgcaggttgaacgtatcttctccaaatttaaattctccaattttaacgcgagccattttgatacacgtgtgtcgattttgcaacaactattgttttttaacgcaaactaaacttattgtggtaagcaataattaaatatgggggaacatgcgccgctacaacactcgtcgttatgaacgcagacggcgccggtctcggcgcaagcggctaaaacgtgttgcgcgttcaacgcggcaaacatcgcaaaagccaatagtacagttttgatttgcatattaacggcgattttttaaattatcttatttaataaatagttatgacgcctacaactccccgcccgcgttgactcgctgcacctcgagcagttcgttgacgccttcctccgtgtggccgaacacgtcgagcgggtggtcgatgaccagcggcgtgccgcacgcgacgcacaagtatctgtacaccgaatgatcgtcgggcgaaggcacgtcggcctccaagtggcaatattggcaaattcgaaaatatatacagttgggttgtttgcgcatatctatcgtggcgttgggcatgtacgtccgaacgttgatttgcatgcaagccgaaattaaatcattgcgattagtgcgattaaaacgttgtacatcctcgcttttaatcatgccgtcgattaaatcgcgcaatcgagtcaagtgatcaaagtgtggaataatgttttctttgtattcccgagtcaagcgcagcgcgtattttaacaaactagccatcttgtaagttagtttcatttaatgcaactttatccaataatatattatgtatcgcacgtcaagaattaacaatgcgcccgttgtcgcatctcaacacgactatgatagagatcaaataaagcgcgaattaaatagcttgcgacgcaacgtgcacgatctgtgcacgcgttccggcacgagctttgattgtaataagtttttacgaagcgatgacatgacccccgtagtgacaacgatcacgcccaaaagaactgccgactacaaaattaccgagtatgtcggtgacgttaaaactattaagccatccaatcgaccgttagtcgaatcaggaccgctggtgcgagaagccgcgaagtatggcgaatgcatcgtataacgtgtggagtccgctcattagagcgtcatgtttagacaagaaagctacatatttaattgatcccgatgattttattgataaattgaccctaactccatacacggtattctacaatggcggggttttggtcaaaatttccggactgcgattgtacatgctgttaacggctccgcccactattaatgaaattaaaaattccaattttaaaaaacgcagcaagagaaacatttgtatgaaagaatgcgtagaaggaaagaaaaatgtcgtcgacatgctgaacaacaagattaatatgcctccgtgtataaaaaaaatattgaacgatttgaaagaaaacaatgtaccgcgcggcggtatgtacaggaagaggtttatactaaactgttacattgcaaacgtggtttcgtgtgccaagtgtgaaaaccgatgtttaatcaaggctctgacgcatttctacaaccacgactccaagtgtgtgggtgaagtcatgcatcttttaatcaaatcccaagatgtgtataaaccaccaaactgccaaaaaatgaaaactgtcgacaagctctgtccgtttgctggcaactgcaagggtctcaatcctatttgtaattattgaataataaaacaattataaatgctaaatttgttttttattaacgatacaaaccaaacgcaacaagaacatttgtagtattatctataattgaaaacgcgtagttataatcgctgaggtaatatttaaaatcattttcaaatgattcacagttaatttgcgacaatataattttattttcacataaactagacgccttgtcgtcttcttcttcgtattccttctctttttcatttttctcctcataaaaattaacatagttattatcgtatccatatatgtatctatcgtatagagtaaattttttgttgtcataaatatatatgtcttttttaatggggtgtatagtaccgctgcgcatagtttttctgtaatttacaacagtgctattttctggtagttcttcggagtgtgttgctttaattattaaatttatataatcaatgaatttgggatcgtcggttttgtacaatatgttgccggcatagtacgcagcttcttctagttcaattacaccattttttagcagcaccggattaacataactttccaaaatgttgtacgaaccgttaaacaaaaacagttcacctcccttttctatactattgtctgcgagcagttgtttgttgttaaaaataacagccattgtaatgagacgcacaaactaatatcacaaactggaaatgtctatcaatatatagttgctgatatcatggagataattaaaatgataaccatctcgcaaataaataagtattttactgttttcgtaacagttttgtaataaaaaaacctataaatattccggattattcataccgtcccaccatcgggcgcggatctatgctactagtaaatcagtcacaccaaggcttcaataaggaacacacaagcaagatggtaagcgctattgttttatatgtgcttttggcggcggcggcgcattctgcctttgcggcggatcccggggacgagatctgtatcggctacctgagcaacaacagcaccgacaaggtggacaccatcatcgagaacaacgtgaccgtgacaagctctgtggaactggtggagacagagcacaccggcagcttttgtagcatcaacggcaagcagcctatctctctgggcgattgctctttcgccggatggattctgggcaaccccatgtgtgatgacctgatcggcaagaccagctggagctacatcgtggagaagcccaaccctaccaacggcatctgttaccctggcatcctggagaatgaggaggagctgaggctgaagtttagcggcgtgctggagttcaataagttcgaggccttcaccagcaatggatggggagccgtgaattctggagccggagtgacagccgcctgtaagttcggcagcagcaacagcttcttccggaacatgatctggctgatccaccagagcggcacataccccgtgatcaagcggaccttcaacaacaccaagggcagggatgtgctggtggtgtggggaattcaccaccctgccaccctgaaagaacaccaggacctgtacaaaaaggacagcagctatgtggctgtgggcagcgagacctacaacaggagattcacccccgagatcagcacaagacccaaggtgaacggacaggccggaaggatgaccttctactggaccatcgtgaagcctggcgagagcatcaccttcgagagcaatggagcctttctggcccctagatacgccttcgagatcgtgtctgtgggcaatggcaagctgttccggagcgagctgaatatcgagagctgctccaccaagtgtcagacagaagtgggcggcatcaacaccaacaagagcttccacagcgtgcacagaaacaccatcggcgactgccccaagtacgtgaacgtgaagagcctgaagctggccacaggcctgagaaatgtgccccagagagagaccagaggactgtttggagccatcgccggattcatcgaaggaggatggcctggcctgatcaatggctggtacggcttccagcacagaaatgaggagggcacaggcattgccgccgataaggagtctacccagaaggccatcgaccagatcaccagcaaggtgaacaacatcgtggaccggatgaacaccaacttcgagagcgtgcagcacgagtttagcgagatcgaggagcggatcaacagactgagcaagcatgtggacgatagcgtggtggacatctggagctataacgcccagctgctggtgctgctggagaacgaaaagaccctggacctgcacgacagcaatgtgaggaacctgcacgagcgcgtgaggagaatgctgaaggacaacgccaaggatgagggcaatggctgcttcaccttctaccacaagtgtgacaacgagtgtatcgagaaagtgaggaacggcacctacgaccacaaggagttcgagaaggagagcaagatcaaccggcaggagatcgagagcggcagactggtgcctagaggatctcctggcagcggatatattcctgaggcccctagagatggacaggcctatgtgagaaaggatggcgaatgggtgctgctgtctacatttctgggacaccaccatcaccaccattgatgagcggccgctgcagatctgatcctttcctgggacccggcaagaaccaaaaactcactctcttcaaggaaatccgtaatgttaaacccgacacgatgaagcttgtcgttggatggaaaggaaaagagttctacagggaaacttggacccgcttcatggaagacagcttccccattgttaacgaccaagaagtgatggatgttttccttgttgtcaacatgcgtcccactagacccaaccgttgttacaaattcctggcccaacacgctctgcgttgcgaccccgactatgtacctcatgacgtgattaggatcgtcgagccttcatgggtgggcagcaacaacgagtaccgcatcagcctggctaagaagggcggcggctgcccaataatgaaccttcactctgagtacaccaactcgttcgaacagttcatcgatcgtgtcatctgggagaacttctacaagcccatcgtttacatcggtaccgactctgctgaagaggaggaaattctccttgaagtttccctggtgttcaaagtaaaggagtttgcaccagacgcacctctgttcactggtccggcgtattaaaacacgatacattgttattagtacatttattaagcgctagattctgtgcgttgttgatttacagacaattgttgtacgtattttaataattcattaaatttataatctttagggtggtatgttagagcgaaaatcaaatgattttcagcgtctttatatctgaatttaaatattaaatcctcaatagatttgtaaaataggtttcgattagtttcaaacaagggttgtttttccgaaccgatggctggactatctaatggattttcgctcaacgccacaaaacttgccaaatcttgtagcagcaatctagctttgtcgatattcgtttgtgttttgttttgtaataaaggttcgacgtcgttcaaaatattatgcgcttttgtatttctttcatcactgtcgttagtgtacaattgactcgacgtaaacacgttaaataaagcttggacatatttaacatcgggcgtgttagctttattaggccgattatcgtcgtcgtcccaaccctcgtcgttagaagttgcttccgaagacgattttgccatagccacacgacgcctattaattgtgtcggctaacacgtccgcgatcaaatttgtagttgagctttttggaattatttctgattgcgggcgtttttgggcgggtttcaatctaactgtgcccgattttaattcagacaacacgttagaaagcgatggtgcaggcggtggtaacatttcagacggcaaatctactaatggcggcggtggtggagctgatgataaatctaccatcggtggaggcgcaggcggggctggcggcggaggcggaggcggaggtggtggcggtgatgcagacggcggtttaggctcaaatgtctctttaggcaacacagtcggcacctcaactattgtactggtttcgggcgccgtttttggtttgaccggtctgagacgagtgcgatttttttcgtttctaatagcttccaacaattgttgtctgtcgtctaaaggtgcagcgggttgaggttccgtcggcattggtggagcgggcggcaattcagacatcgatggtggtggtggtggtggaggcgctggaatgttaggcacgggagaaggtggtggcggcggtgccgccggtataatttgttctggtttagtttgttcgcgcacgattgtgggcaccggcgcaggcgccgctggctgcacaacggaaggtcgtctgcttcgaggcagcgcttggggtggtggcaattcaatattataattggaatacaaatcgtaaaaatctgctataagcattgtaatttcgctatcgtttaccgtgccgatatttaacaaccgctcaatgtaagcaattgtattgtaaagagattgtctcaagctccgcacgccgataacaagccttttcatttttactacagcattgtagtggcgagacacttcgctgtcgtcgacgtacatgtatgctttgttgtcaaaaacgtcgttggcaagctttaaaatatttaaaagaacatctctgttcagcaccactgtgttgtcgtaaatgttgtttttgataatttgcgcttccgcagtatcgacacgttcaaaaaattgatgcgcatcaattttgttgttcctattattgaataaataagattgtacagattcatatctacgattcgtcatggccaccacaaatgctacgctgcaaacgctggtacaattttacgaaaactgcaaaaacgtcaaaactcggtataaaataatcaacgggcgctttggcaaaatatctattttatcgcacaagcccactagcaaattgtatttgcagaaaacaatttcggcgcacaattttaacgctgacgaaataaaagttcaccagttaatgagcgaccacccaaattttataaaaatctattttaatcacggttccatcaacaaccaagtgatcgtgatggactacattgactgtcccgatttatttgaaacactacaaattaaaggcgagctttcgtaccaacttgttagcaatattattagacagctgtgtgaagcgctcaacgatttgcacaagcacaatttcatacacaacgacataaaactcgaaaatgtcttatatttcgaagcacttgatcgcgtgtatgtttgcgattacggattgtgcaaacacgaaaactcacttagcgtgcacgacggcacgttggagtattttagtccggaaaaaattcgacacacaactatgcacgtttcgtttgactggtacgcggcgtgttaacatacaagttgctaaccggcggttcgtaatcatggtcatagctgtttcctgtgtgaaattgttatccgctcacaattccacacaacatacgagccggaagcataaagtgtaaagcctggggtgcctaatgagtgagctaactcacattaattgcgttgcgctcactgcccgctttccagtcgggaaacctgtcgtgccagctgcattaatgaatcggccaacgcgcggggagaggcggtttgcgtattgggcgctcttccgcttcctcgctcactgactcgctgcgctcggtcgttcggctgcggcgagcggtatcagctcactcaaaggcggtaatacggttatccacagaatcaggggataacgcaggaaagaacatgtgagcaaaaggccagcaaaaggccaggaaccgtaaaaaggccgcgttgctggcgtttttccataggctccgcccccctgacgagcatcacaaaaatcgacgctcaagtcagaggtggcgaaacccgacaggactataaagataccaggcgtttccccctggaagctccctcgtgcgctctcctgttccgaccctgccgcttaccggatacctgtccgcctttctcccttcgggaagcgtggcgctttctcatagctcacgctgtaggtatctcagttcggtgtaggtcgttcgctccaagctgggctgtgtgcacgaaccccccgttcagcccgaccgctgcgccttatccggtaactatcgtcttgagtccaacccggtaagacacgacttatcgccactggcagcagccactggtaacaggattagcagagcgaggtatgtaggcggtgctacagagttcttgaagtggtggcctaactacggctacactagaaggacagtatttggtatctgcgctctgctgaagccagttaccttcggaaaaagagttggtagctcttgatccggcaaacaaaccaccgctggtagcggtggtttttttgtttgcaagcagcagattacgcgcagaaaaaaaggatctcaagaagatcctttgatcttttctacggggtctgacgctcagtggaacgaaaactcacgttaagggattttggtcatgagattatcaaaaaggatcttcacctagatccttttaaattaaaaatgaagttttaaatcaatctaaagtatatatgagtaaacttggtctgacagttaccaatgcttaatcagtgaggcacctatctcagcgatctgtctatttcgttcatccatagttgcctgactccccgtcgtgtagataactacgatacgggagggcttaccatctggccccagtgctgcaatgataccgcgagacccacgctcaccggctccagatttatcagcaataaaccagccagccggaagggccgagcgcagaagtggtcctgcaactttatccgcctccatccagtctattaattgttgccgggaagctagagtaagtagttcgccagttaatagtttgcgcaacgttgttgccattgctacaggcatcgtggtgtcacgctcgtcgtttggtatggcttcattcagctccggttcccaacgatcaaggcgagttacatgatcccccatgttgtgcaaaaaagcggttagctccttcggtcctccgatcgttgtcagaagtaagttggccgcagtgttatcactcatggttatggcagcactgcataattctcttactgtcatgccatccgtaagatgcttttctgtgactggtgagtactcaaccaagtcattctgagaatagtgtatgcggcgaccgagttgctcttgcccggcgtcaatacgggataataccgcgccacatagcagaactttaaaagtgctcatcattggaaaacgttcttcggggcgaaaactctcaaggatcttaccgctgttgagatccagttcgatgtaacccactcgtgcacccaactgatcttcagcatcttttactttcaccagcgtttctgggtgagcaaaaacaggaaggcaaaatgccgcaaaaaagggaataagggcgacacggaaatgttgaatactcatactcttcctttttcaatattattgaagcatttatcagggttattgtctcatgagcggatacatatttgaatgtatttagaaaaataaacaaataggggttccgcgcacatttccccgaaaagtgccacctgacgtctaagaaaccattattatcatgacattaacctataaaaataggcgtatcacgaggccctttcgtctcgcgcgtttcggtgatgacggtgaaaacctctgacacatgcagctcccggagacggtcacagcttgtctgtaagcggatgccgggagcagacaagcccgtcagggcgcgtcagcgggtgttggcgggtgtcggggctggcttaactatgcggcatcagagcagattgtactgagagtgcaccatatgcggtgtgaaataccgcacagatgcgtaaggagaaaataccgcatcaggcgccattcgccattcaggctgcgcaactgttgggaagggcgatcggtgcgggcctcttcgctattacgccagctggcgaaagggggatgtgctgcaaggcgattaagttgggtaacgccagggttttcccagtcacgacgttgtaaaacgacggccagtgcc

SEQ ID NO: 89 - DNA, 6105 bp, Artificial Sequence
  Plasmid DNA: 54671
tcgcgcgtttcggtgatgacggtgaaaacctctgacacatgcagctcccggagacggtcacagcttgtctgtaagcggatgccgggagcagacaagcccgtcagggcgcgtcagcgggtgttggcgggtgtcggggctggcttaactatgcggcatcagagcagattgtactgagagtgcaccatatgcggtgtgaaataccgcacagatgcgtaaggagaaaataccgcatcagattggctattggccattgcatacgttgtatccatatcataatatgtacatttatattggctcatgtccaacattaccgccatgttgacattgattattgactagttattaatagtaatcaattacgggaacttccatagcccatatatggagttccgcgttacataacttacgggaatttccaaacctggctgaccgcccaacgacccccgcccattgacgtcaataatgacgtatgttcccatagtaacgccaatagggaacttccattgacgtcaatgggtggagtatttacggtaaactgcccacttgggaatttccaagtgtatcatatgccaagtacgccccctattgacgtcaatgacgggaacttccataagcttgcattatgcccagtacatgaccttatgggaatttcctacttggcagtacatctacgtattagtcatcgctattaccatggtgatgcggttttggcagtacatcaatgggcgtggatagcggtttgactcacgggaacttccaagtctccaccccattgacgtcaatgggagtttgttttgactcaccaaaatcaacgggaatttccaaaatgtcgtaacaactccgccccattgacgcaaatgggcggtaggcgtgtacggtgggaggtctatataagcagagctcgtttagtgaaccgtcagatcgcctggagacgccatccacgctgttttgacctccatagaagacaccgggaccgatccagcctccatcggctcgcatctctccttcacgcgcccgccgccctacctgaggccgccatccacgccggttgagtcgcgttctgccgcctcccgcctgtggtgcctcctgaactgcgtccgccgtctaggtaagtttaaagctcaggtcgagaccgggcctttgtccggcgctcccttggagcctacctagactcagccggctctccacgctttgcctgaccctgcttgctcaactctagttaacggtggagggcagtgtagtctgagcagtactcgttgctgccgcgcgcgccaccagacataatagctgacagactaacagactgttcctttccatgggtcttttctgcagtcaccgtcgtcgacacgtgtgatcagatatcgcggccgctctagagatatcgccaccatgaacacccagatcctgattctggccctggtggccatcattcccaccaacgccgacaagatctgtctgggacaccacgccgtgtctaatggcgccaaggtgaacaccctgaccgagaggggcgtggaagtggtgaatgccaccgagaccgtggagagaaccaacgtgcccaggatctgtagcaagggcaagagaaccgtggatctgggacagtgtggactgctgggcacaatcacaggacccccccagtgtgatcagttcctggagttcagcgccgatctgatcatcgagcggagagaaggcaacgatgtgtgctaccccggcaagttcgtgaatgaggaggccctgaggcagatcctgagaaagagcggcggcatcgacaaggaaaccatgggcttcacctacagcggcatcagaaccaatggagccacctccgcctgtagaagaagcggcagcagcttctacgccgagatgaagtggctgctgtccaacacagacaatgccgccttcccccagatgaccaagagctacaagaacatcaggaaggaccccgccctgatcatttggggcatccaccactctggatctacagccgagcagaccaagctgtatggcagcggcaacaagctgatcacagtgggcagcagcaattaccagcagagcttcgtgccttctcctggagccagacctcaggtgaacggccagagcggcagaatcgatttccactggctgatgctgaaccccaacgacaccgtgaccttcagcttcaacggcgcctttatcgcccctgatagggcctctttcctgaggggcaagagcatgggcatccagtctgaagtgcaggtggacgccaattgtgagggcgattgctaccacagcggcggcacaattctgagcagcctgcccttccagaacatcaacagcaggacagtgggcgagtgtcccagatatgtgaagcaggagagcctgctgctggccacaggcatgaagaacgtgccccagagagagacaagaggcctgtttggagccatcgccggattcatcgagaatggctgggagggactggtggatggctggtacggcttcagacaccagaatgcccagggagaaggaacagccgccgactacaagtctacacagagcgccatcgatcagatcaccggcaagctgaacaggctgatcgagaaaaccaatcagcagtttgagctgatcgacaacgagttcaccgaggtggagaagcagatcggcaacgtgatcaactggaccagagacagcctgacagagatgtggagctacaacgccgaactgctggtggccatggagaatcagcacaccatcgacctggccgacagcgagatgaacaagctgtacgagagagtgaggaggcagctgagagagaatgccgaggaggacggcacaggctgcttcgagatcttccacaagtgtgacgacgactgtatggccagcatccggaacaacacctacgaccacagcaagtacagagaggaggccatccagaacagaatccagatcgaccccgtgaaactgagcagcggctacaaggatgtgatcctgtggttcagctttggcgccagctgctttatcctgctggccatcgccatgggcctggtgttcatctgtgtgaagaacggcaacatgaggtgtaccatctgtatctgatgaacacgtgggatccagatctgctgtgccttctagttgccagccatctgttgtttgcccctcccccgtgccttccttgaccctggaaggtgccactcccactgtcctttcctaataaaatgaggaaattgcatcgcattgtctgagtaggtgtcattctattctggggggtggggtggggcaggacagcaagggggaggattgggaagacaatagcaggcatgctggggatgcggtgggctctatgggtacccaggtgctgaagaattgacccggttcctcctgggccagaaagaagcaggcacatccccttctctgtgacacaccctgtccacgcccctggttcttagttccagccccactcataggacactcatagctcaggagggctccgccttcaatcccacccgctaaagtacttggagcggtctctccctccctcatcagcccaccaaaccaaacctagcctccaagagtgggaagaaattaaagcaagataggctattaagtgcagagggagagaaaatgcctccaacatgtgaggaagtaatgagagaaatcatagaattttaaggccatgatttaaggccatcatggccttaatcttccgcttcctcgctcactgactcgctgcgctcggtcgttcggctgcggcgagcggtatcagctcactcaaaggcggtaatacggttatccacagaatcaggggataacgcaggaaagaacatgtgagcaaaaggccagcaaaaggccaggaaccgtaaaaaggccgcgttgctggcgtttttccataggctccgcccccctgacgagcatcacaaaaatcgacgctcaagtcagaggtggcgaaacccgacaggactataaagataccaggcgtttccccctggaagctccctcgtgcgctctcctgttccgaccctgccgcttaccggatacctgtccgcctttctcccttcgggaagcgtggcgctttctcatagctcacgctgtaggtatctcagttcggtgtaggtcgttcgctccaagctgggctgtgtgcacgaaccccccgttcagcccgaccgctgcgccttatccggtaactatcgtcttgagtccaacccggtaagacacgacttatcgccactggcagcagccactggtaacaggattagcagagcgaggtatgtaggcggtgctacagagttcttgaagtggtggcctaactacggctacactagaagaacagtatttggtatctgcgctctgctgaagccagttaccttcggaaaaagagttggtagctcttgatccggcaaacaaaccaccgctggtagcggtggtttttttgtttgcaagcagcagattacgcgcagaaaaaaaggatctcaagaagatcctttgatcttttctacggggtctgacgctcagtggaacgaaaactcacgttaagggattttggtcatgagattatcaaaaaggatcttcacctagatccttttaaattaaaaatgaagttttaaatcaatctaaagtatatatgagtaaacttggtctgacagttaccaatgcttaatcagtgaggcacctatctcagcgatctgtctatttcgttcatccatagttgcctgactcggggggggggggcgctgaggtctgcctcgtgaagaaggtgttgctgactcataccaggcctgaatcgccccatcatccagccagaaagtgagggagccacggttgatgagagctttgttgtaggtggaccagttggtgattttgaacttttgctttgccacggaacggtctgcgttgtcgggaagatgcgtgatctgatccttcaactcagcaaaagttcgatttattcaacaaagccgccgtcccgtcaagtcagcgtaatgctctgccagtgttacaaccaattaaccaattctgattagaaaaactcatcgagcatcaaatgaaactgcaatttattcatatcaggattatcaataccatatttttgaaaaagccgtttctgtaatgaaggagaaaactcaccgaggcagttccataggatggcaagatcctggtatcggtctgcgattccgactcgtccaacatcaatacaacctattaatttcccctcgtcaaaaataaggttatcaagtgagaaatcaccatgagtgacgactgaatccggtgagaatggcaaaagcttatgcatttctttccagacttgttcaacaggccagccattacgctcgtcatcaaaatcactcgcatcaaccaaaccgttattcattcgtgattgcgcctgagcgagacgaaatacgcgatcgctgttaaaaggacaattacaaacaggaatcgaatgcaaccggcgcaggaacactgccagcgcatcaacaatattttcacctgaatcaggatattcttctaatacctggaatgctgttttcccggggatcgcagtggtgagtaaccatgcatcatcaggagtacggataaaatgcttgatggtcggaagaggcataaattccgtcagccagtttagtctgaccatctcatctgtaacatcattggcaacgctacctttgccatgtttcagaaacaactctggcgcatcgggcttcccatacaatcgatagattgtcgcacctgattgcccgacattatcgcgagcccatttatacccatataaatcagcatccatgttggaatttaatcgcggcctcgagcaagacgtttcccgttgaatatggctcataacaccccttgtattactgtttatgtaagcagacagttttattgttcatgatgatatatttttatcttgtgcaatgtaacatcagagattttgagacacaacgtggctttccccccccccccattattgaagcatttatcagggttattgtctcatgagcggatacatatttgaatgtatttagaaaaataaacaaataggggttccgcgcacatttccccgaaaagtgccacctgacgtctaagaaaccattattatcatgacattaacctataaaaataggcgtatcacgaggccctttcgtc

SEQ ID NO: 90 - DNA, 6108 bp, Artificial Sequence
  Plasmid DNA: 54672
tcgcgcgtttcggtgatgacggtgaaaacctctgacacatgcagctcccggagacggtcacagcttgtctgtaagcggatgccgggagcagacaagcccgtcagggcgcgtcagcgggtgttggcgggtgtcggggctggcttaactatgcggcatcagagcagattgtactgagagtgcaccatatgcggtgtgaaataccgcacagatgcgtaaggagaaaataccgcatcagattggctattggccattgcatacgttgtatccatatcataatatgtacatttatattggctcatgtccaacattaccgccatgttgacattgattattgactagttattaatagtaatcaattacgggaacttccatagcccatatatggagttccgcgttacataacttacgggaatttccaaacctggctgaccgcccaacgacccccgcccattgacgtcaataatgacgtatgttcccatagtaacgccaatagggaacttccattgacgtcaatgggtggagtatttacggtaaactgcccacttgggaatttccaagtgtatcatatgccaagtacgccccctattgacgtcaatgacgggaacttccataagcttgcattatgcccagtacatgaccttatgggaatttcctacttggcagtacatctacgtattagtcatcgctattaccatggtgatgcggttttggcagtacatcaatgggcgtggatagcggtttgactcacgggaacttccaagtctccaccccattgacgtcaatgggagtttgttttgactcaccaaaatcaacgggaatttccaaaatgtcgtaacaactccgccccattgacgcaaatgggcggtaggcgtgtacggtgggaggtctatataagcagagctcgtttagtgaaccgtcagatcgcctggagacgccatccacgctgttttgacctccatagaagacaccgggaccgatccagcctccatcggctcgcatctctccttcacgcgcccgccgccctacctgaggccgccatccacgccggttgagtcgcgttctgccgcctcccgcctgtggtgcctcctgaactgcgtccgccgtctaggtaagtttaaagctcaggtcgagaccgggcctttgtccggcgctcccttggagcctacctagactcagccggctctccacgctttgcctgaccctgcttgctcaactctagttaacggtggagggcagtgtagtctgagcagtactcgttgctgccgcgcgcgccaccagacataatagctgacagactaacagactgttcctttccatgggtcttttctgcagtcaccgtcgtcgacacgtgtgatcagatatcgcggccgctctagagatatcgccaccatggagaccatcagcctgatcaccatcctgctggtggtgacagccagcaacgccgacaagatctgtatcggccaccagagcaccaatagcaccgagaccgtggataccctgaccgagaccaatgtgcctgtgacacacgccaaagagctgctgcacaccgagcacaatggaatgctgtgtgccacaagcctgggacaccctctgatcctggacacctgtacaatcgagggcctggtgtacggcaatcccagctgtgatctgctgctggagggccgggagtggagctacatcgtggagagaagcagcgccgtgaatggcacatgctaccccggcaacgtggagaatctggaggagctgaggaccctgtttagcagcgccagcagctaccagagaatccagatcttccccgacaccacctggaatgtgacctacaccggcacaagcagagcctgtagcggcagcttctaccggtctatgagatggctgacccagaagagcggcttttaccctgtgcaggacgcccagtacaccaacaaccggggcaagagcatcctgtttgtgtggggcattcaccaccctcctacctacaccgagcagaccaacctgtacatccggaacgacaccaccacaagcgtgaccaccgaggacctgaacagaaccttcaagcccgtgatcggacctagacctctggtgaatggcctgcagggcaggatcgattactactggagcgtgctgaagcctggacagaccctgagagtgaggagcaacggcaatctgatcgccccttggtatggacatgtgctgtctggaggaagccacggcagaatcctgaaaaccgacctgaagagcggcaattgtgtggtgcagtgccagacagagaagggcggcctgaatagcacactgcccttccacaacatcagcaagtacgccttcggcacctgtcccaagtatgtgagggtgaacagcctgaaactggctgtgggcctgagaaatgtgcctcagagggagaccagaggactgtttggagccatcgccggattcatcgaagggggatggcctggactggtggccggatggtatggcttccagcacagcaatgatcagggagtgggaatggccgccgatagagactctacccagaaggccatcgacaagatcaccagcaaggtgaacaacatcgtggacaagatgaacaagcagtacgagatcatcgaccacgagttcagcgaggtggagaccaggctgaacatgatcaacaacaagatcgacgaccagatccaggatgtgtgggcctataatgccgaactgctggtgctgctggaaaaccagaaaaccctggacgagcacgacgccaacgtgaacaatctgtacaacaaggtgaagagagccctgggaagcaacgccatggaggatggcaagggctgctttgagctgtaccacaagtgtgacgaccagtgtatggagacaatcaggaacggcacctacaaccggaggaagtacagggaggagagcagactggagaggcagaaaatcgagggcgtgaagctggaatctgagggcgcctacaagatcctgaccatctacagcacagtggcctcttctctggtgctggccatgggatttgccgcctttctgttctgggccatgagcaatggcagctgccggtgtaacatctgtatctgatgaacacgtgggatccagatctgctgtgccttctagttgccagccatctgttgtttgcccctcccccgtgccttccttgaccctggaaggtgccactcccactgtcctttcctaataaaatgaggaaattgcatcgcattgtctgagtaggtgtcattctattctggggggtggggtggggcaggacagcaagggggaggattgggaagacaatagcaggcatgctggggatgcggtgggctctatgggtacccaggtgctgaagaattgacccggttcctcctgggccagaaagaagcaggcacatccccttctctgtgacacaccctgtccacgcccctggttcttagttccagccccactcataggacactcatagctcaggagggctccgccttcaatcccacccgctaaagtacttggagcggtctctccctccctcatcagcccaccaaaccaaacctagcctccaagagtgggaagaaattaaagcaagataggctattaagtgcagagggagagaaaatgcctccaacatgtgaggaagtaatgagagaaatcatagaattttaaggccatgatttaaggccatcatggccttaatcttccgcttcctcgctcactgactcgctgcgctcggtcgttcggctgcggcgagcggtatcagctcactcaaaggcggtaatacggttatccacagaatcaggggataacgcaggaaagaacatgtgagcaaaaggccagcaaaaggccaggaaccgtaaaaaggccgcgttgctggcgtttttccataggctccgcccccctgacgagcatcacaaaaatcgacgctcaagtcagaggtggcgaaacccgacaggactataaagataccaggcgtttccccctggaagctccctcgtgcgctctcctgttccgaccctgccgcttaccggatacctgtccgcctttctcccttcgggaagcgtggcgctttctcatagctcacgctgtaggtatctcagttcggtgtaggtcgttcgctccaagctgggctgtgtgcacgaaccccccgttcagcccgaccgctgcgccttatccggtaactatcgtcttgagtccaacccggtaagacacgacttatcgccactggcagcagccactggtaacaggattagcagagcgaggtatgtaggcggtgctacagagttcttgaagtggtggcctaactacggctacactagaagaacagtatttggtatctgcgctctgctgaagccagttaccttcggaaaaagagttggtagctcttgatccggcaaacaaaccaccgctggtagcggtggtttttttgtttgcaagcagcagattacgcgcagaaaaaaaggatctcaagaagatcctttgatcttttctacggggtctgacgctcagtggaacgaaaactcacgttaagggattttggtcatgagattatcaaaaaggatcttcacctagatccttttaaattaaaaatgaagttttaaatcaatctaaagtatatatgagtaaacttggtctgacagttaccaatgcttaatcagtgaggcacctatctcagcgatctgtctatttcgttcatccatagttgcctgactcggggggggggggcgctgaggtctgcctcgtgaagaaggtgttgctgactcataccaggcctgaatcgccccatcatccagccagaaagtgagggagccacggttgatgagagctttgttgtaggtggaccagttggtgattttgaacttttgctttgccacggaacggtctgcgttgtcgggaagatgcgtgatctgatccttcaactcagcaaaagttcgatttattcaacaaagccgccgtcccgtcaagtcagcgtaatgctctgccagtgttacaaccaattaaccaattctgattagaaaaactcatcgagcatcaaatgaaactgcaatttattcatatcaggattatcaataccatatttttgaaaaagccgtttctgtaatgaaggagaaaactcaccgaggcagttccataggatggcaagatcctggtatcggtctgcgattccgactcgtccaacatcaatacaacctattaatttcccctcgtcaaaaataaggttatcaagtgagaaatcaccatgagtgacgactgaatccggtgagaatggcaaaagcttatgcatttctttccagacttgttcaacaggccagccattacgctcgtcatcaaaatcactcgcatcaaccaaaccgttattcattcgtgattgcgcctgagcgagacgaaatacgcgatcgctgttaaaaggacaattacaaacaggaatcgaatgcaaccggcgcaggaacactgccagcgcatcaacaatattttcacctgaatcaggatattcttctaatacctggaatgctgttttcccggggatcgcagtggtgagtaaccatgcatcatcaggagtacggataaaatgcttgatggtcggaagaggcataaattccgtcagccagtttagtctgaccatctcatctgtaacatcattggcaacgctacctttgccatgtttcagaaacaactctggcgcatcgggcttcccatacaatcgatagattgtcgcacctgattgcccgacattatcgcgagcccatttatacccatataaatcagcatccatgttggaatttaatcgcggcctcgagcaagacgtttcccgttgaatatggctcataacaccccttgtattactgtttatgtaagcagacagttttattgttcatgatgatatatttttatcttgtgcaatgtaacatcagagattttgagacacaacgtggctttccccccccccccattattgaagcatttatcagggttattgtctcatgagcggatacatatttgaatgtatttagaaaaataaacaaataggggttccgcgcacatttccccgaaaagtgccacctgacgtctaagaaaccattattatcatgacattaacctataaaaataggcgtatcacgaggccctttcgtc

SEQ ID NO: 91 - DNA, 6123 bp, Artificial Sequence
  Plasmid DNA: 54673
tcgcgcgtttcggtgatgacggtgaaaacctctgacacatgcagctcccggagacggtcacagcttgtctgtaagcggatgccgggagcagacaagcccgtcagggcgcgtcagcgggtgttggcgggtgtcggggctggcttaactatgcggcatcagagcagattgtactgagagtgcaccatatgcggtgtgaaataccgcacagatgcgtaaggagaaaataccgcatcagattggctattggccattgcatacgttgtatccatatcataatatgtacatttatattggctcatgtccaacattaccgccatgttgacattgattattgactagttattaatagtaatcaattacgggaacttccatagcccatatatggagttccgcgttacataacttacgggaatttccaaacctggctgaccgcccaacgacccccgcccattgacgtcaataatgacgtatgttcccatagtaacgccaatagggaacttccattgacgtcaatgggtggagtatttacggtaaactgcccacttgggaatttccaagtgtatcatatgccaagtacgccccctattgacgtcaatgacgggaacttccataagcttgcattatgcccagtacatgaccttatgggaatttcctacttggcagtacatctacgtattagtcatcgctattaccatggtgatgcggttttggcagtacatcaatgggcgtggatagcggtttgactcacgggaacttccaagtctccaccccattgacgtcaatgggagtttgttttgactcaccaaaatcaacgggaatttccaaaatgtcgtaacaactccgccccattgacgcaaatgggcggtaggcgtgtacggtgggaggtctatataagcagagctcgtttagtgaaccgtcagatcgcctggagacgccatccacgctgttttgacctccatagaagacaccgggaccgatccagcctccatcggctcgcatctctccttcacgcgcccgccgccctacctgaggccgccatccacgccggttgagtcgcgttctgccgcctcccgcctgtggtgcctcctgaactgcgtccgccgtctaggtaagtttaaagctcaggtcgagaccgggcctttgtccggcgctcccttggagcctacctagactcagccggctctccacgctttgcctgaccctgcttgctcaactctagttaacggtggagggcagtgtagtctgagcagtactcgttgctgccgcgcgcgccaccagacataatagctgacagactaacagactgttcctttccatgggtcttttctgcagtcaccgtcgtcgacacgtgtgatcagatatcgcggccgctctagagatatcgccaccatggacatccctgtgatcgcctttctgatcctgaccagcacatgtgtgcaggccgacagaatctgtgtgggctacctgagcaccaatagcagcgagagagtggataccctgctggagaacaacgtgcctgtgaccagctctgtggatctggtggagaccaatcacaccggcacctactgtagcctgggcggcatttctcctgtgcacctgggcgattgttctttcgagggctggattgtgggaaatcctgcctgtgccagcaatctgggcatcagggagtggagctacctgatcgaagatccttctgcccctcacggcctgtgttatcctggcgagctggacaataacggcgagctgaggcacctgtttagcggcatccggagctttagcaggacagagctgatcgcccctacatcttggggagccgtgaatgatggagtgagcagcgcctgtcaggataagggcgccagcagcttctacagaaacctggtgtggttcgtggagaggggcaacaagtaccctgtgatccggggcacctacaataataccaccggcagggacgtgctggtgatctggggaattcaccaccctgtgagcacagatgaggccagaaagctgtacgtgaacgacaacccctacaccctggtgtctacaagcagctggagccggaagtacaatctggagatcggcatcagacctggctacaacggccagaaaagctggatgaagatctactggtatctgatgcaccctggcgagagcatcagcttcgagagcaatggaggactgctggcccctaagtacggctacatcatcgaggagtacggcaagggcagaatcttccagagccggatcagaatcgccaagtgtaacaccaagtgccagacatctgtgggcggcatcaacaccaacaagaccttccagaacatcgagagaaacgccctgggagactgccctaagtacatcaagagcggccagctgaaactggccaccggcctgagaaatgtgcctcagagggagaccagaggactgtttggagccatcgccggattcatcgaaggaggatggcctggcctgatcaatggctggtacggcttccagcaccagaatgagcagggagtgggaatggccgccgataaggagtctacccagaaggccatcgaccagatcaccaccaagatcaacaatatcatcgagaagatgaacggcaactacgacagcatcaggggcgagtttagccaggtggagcagcggattaacatgctggccgacaggattgatgatgccgtgaccgatgtgtggagctacaacgccaaactgctggtgctgctggaaaacgacaagaccctggacatgcacgacgccaatgtgagaaacctgcacgaccaggtgaggagagtgctgaaaaccaacgccatcgacgagggcaatggctgttttgagctgctgcacaagtgtaacgacagctgtatggagaccatccggaacggcacctataaccacaccgagtacgaggaggagagcaagctgaagaggcaggagatcgagggcatcaagctgaagtccgacgacagcgtgtacaaggccctgagcatctacagctgtatcgccagcagcattgtgctggtgggactgatcctggcctttatcatgtgggcctgctccagcggcaactgtcggttcaatgtgtgtatctgatgaacacgtgggatccagatctgctgtgccttctagttgccagccatctgttgtttgcccctcccccgtgccttccttgaccctggaaggtgccactcccactgtcctttcctaataaaatgaggaaattgcatcgcattgtctgagtaggtgtcattctattctggggggtggggtggggcaggacagcaagggggaggattgggaagacaatagcaggcatgctggggatgcggtgggctctatgggtacccaggtgctgaagaattgacccggttcctcctgggccagaaagaagcaggcacatccccttctctgtgacacaccctgtccacgcccctggttcttagttccagccccactcataggacactcatagctcaggagggctccgccttcaatcccacccgctaaagtacttggagcggtctctccctccctcatcagcccaccaaaccaaacctagcctccaagagtgggaagaaattaaagcaagataggctattaagtgcagagggagagaaaatgcctccaacatgtgaggaagtaatgagagaaatcatagaattttaaggccatgatttaaggccatcatggccttaatcttccgcttcctcgctcactgactcgctgcgctcggtcgttcggctgcggcgagcggtatcagctcactcaaaggcggtaatacggttatccacagaatcaggggataacgcaggaaagaacatgtgagcaaaaggccagcaaaaggccaggaaccgtaaaaaggccgcgttgctggcgtttttccataggctccgcccccctgacgagcatcacaaaaatcgacgctcaagtcagaggtggcgaaacccgacaggactataaagataccaggcgtttccccctggaagctccctcgtgcgctctcctgttccgaccctgccgcttaccggatacctgtccgcctttctcccttcgggaagcgtggcgctttctcatagctcacgctgtaggtatctcagttcggtgtaggtcgttcgctccaagctgggctgtgtgcacgaaccccccgttcagcccgaccgctgcgccttatccggtaactatcgtcttgagtccaacccggtaagacacgacttatcgccactggcagcagccactggtaacaggattagcagagcgaggtatgtaggcggtgctacagagttcttgaagtggtggcctaactacggctacactagaagaacagtatttggtatctgcgctctgctgaagccagttaccttcggaaaaagagttggtagctcttgatccggcaaacaaaccaccgctggtagcggtggtttttttgtttgcaagcagcagattacgcgcagaaaaaaaggatctcaagaagatcctttgatcttttctacggggtctgacgctcagtggaacgaaaactcacgttaagggattttggtcatgagattatcaaaaaggatcttcacctagatccttttaaattaaaaatgaagttttaaatcaatctaaagtatatatgagtaaacttggtctgacagttaccaatgcttaatcagtgaggcacctatctcagcgatctgtctatttcgttcatccatagttgcctgactcggggggggggggcgctgaggtctgcctcgtgaagaaggtgttgctgactcataccaggcctgaatcgccccatcatccagccagaaagtgagggagccacggttgatgagagctttgttgtaggtggaccagttggtgattttgaacttttgctttgccacggaacggtctgcgttgtcgggaagatgcgtgatctgatccttcaactcagcaaaagttcgatttattcaacaaagccgccgtcccgtcaagtcagcgtaatgctctgccagtgttacaaccaattaaccaattctgattagaaaaactcatcgagcatcaaatgaaactgcaatttattcatatcaggattatcaataccatatttttgaaaaagccgtttctgtaatgaaggagaaaactcaccgaggcagttccataggatggcaagatcctggtatcggtctgcgattccgactcgtccaacatcaatacaacctattaatttcccctcgtcaaaaataaggttatcaagtgagaaatcaccatgagtgacgactgaatccggtgagaatggcaaaagcttatgcatttctttccagacttgttcaacaggccagccattacgctcgtcatcaaaatcactcgcatcaaccaaaccgttattcattcgtgattgcgcctgagcgagacgaaatacgcgatcgctgttaaaaggacaattacaaacaggaatcgaatgcaaccggcgcaggaacactgccagcgcatcaacaatattttcacctgaatcaggatattcttctaatacctggaatgctgttttcccggggatcgcagtggtgagtaaccatgcatcatcaggagtacggataaaatgcttgatggtcggaagaggcataaattccgtcagccagtttagtctgaccatctcatctgtaacatcattggcaacgctacctttgccatgtttcagaaacaactctggcgcatcgggcttcccatacaatcgatagattgtcgcacctgattgcccgacattatcgcgagcccatttatacccatataaatcagcatccatgttggaatttaatcgcggcctcgagcaagacgtttcccgttgaatatggctcataacaccccttgtattactgtttatgtaagcagacagttttattgttcatgatgatatatttttatcttgtgcaatgtaacatcagagattttgagacacaacgtggctttccccccccccccattattgaagcatttatcagggttattgtctcatgagcggatacatatttgaatgtatttagaaaaataaacaaataggggttccgcgcacatttccccgaaaagtgccacctgacgtctaagaaaccattattatcatgacattaacctataaaaataggcgtatcacgaggccctttcgtc

SEQ ID NO: 92 - DNA, 6126 bp, Artificial Sequence
  Plasmid DNA: 54675
tcgcgcgtttcggtgatgacggtgaaaacctctgacacatgcagctcccggagacggtcacagcttgtctgtaagcggatgccgggagcagacaagcccgtcagggcgcgtcagcgggtgttggcgggtgtcggggctggcttaactatgcggcatcagagcagattgtactgagagtgcaccatatgcggtgtgaaataccgcacagatgcgtaaggagaaaataccgcatcagattggctattggccattgcatacgttgtatccatatcataatatgtacatttatattggctcatgtccaacattaccgccatgttgacattgattattgactagttattaatagtaatcaattacgggaacttccatagcccatatatggagttccgcgttacataacttacgggaatttccaaacctggctgaccgcccaacgacccccgcccattgacgtcaataatgacgtatgttcccatagtaacgccaatagggaacttccattgacgtcaatgggtggagtatttacggtaaactgcccacttgggaatttccaagtgtatcatatgccaagtacgccccctattgacgtcaatgacgggaacttccataagcttgcattatgcccagtacatgaccttatgggaatttcctacttggcagtacatctacgtattagtcatcgctattaccatggtgatgcggttttggcagtacatcaatgggcgtggatagcggtttgactcacgggaacttccaagtctccaccccattgacgtcaatgggagtttgttttgactcaccaaaatcaacgggaatttccaaaatgtcgtaacaactccgccccattgacgcaaatgggcggtaggcgtgtacggtgggaggtctatataagcagagctcgtttagtgaaccgtcagatcgcctggagacgccatccacgctgttttgacctccatagaagacaccgggaccgatccagcctccatcggctcgcatctctccttcacgcgcccgccgccctacctgaggccgccatccacgccggttgagtcgcgttctgccgcctcccgcctgtggtgcctcctgaactgcgtccgccgtctaggtaagtttaaagctcaggtcgagaccgggcctttgtccggcgctcccttggagcctacctagactcagccggctctccacgctttgcctgaccctgcttgctcaactctagttaacggtggagggcagtgtagtctgagcagtactcgttgctgccgcgcgcgccaccagacataatagctgacagactaacagactgttcctttccatgggtcttttctgcagtcaccgtcgtcgacacgtgtgatcagatatcgcggccgctctagagatatcgccaccatgatcgccatcatcatcattaccatcctggccaccacaggcaagagcgacaagatctgtatcggctaccacgccaacaatagcaccacccaggtggacacaatcctggagaagaacgtgaccgtgacacactctgtggagctgctggagaaccagaaggaggagcggttctgtaaggtgctgaacagagcccctctggatctgaggagctgtacaatcgagggctggattctgggcaaccccagatgtgatctgctgctgggcgatcagtggtggagctacatcgtggagagacccacagcccagaatggcatctgttaccccggcgtgctgaatgatgtggaggagctgaaggccctgatcggcagcggagagaaggtggagagattcgagatgttccccaagtctacatgggccggagtggatacaaatagcggcgtgtccagcgcctgtccttacaccaccggcagcagcttctacagaaacctgctgtggatcatcaagacccgcagcagcgcctatcctgtgatcaggggcacctacaacaacaccggcaaccagcccatcctgtacttttggggcgtgcaccaccctccagataccaacgagcagaacaccctgtacggcagcggcgacagatatgtgagaatgggcaccgagaggatgaatttcgccaagggccctgaaattgccgccagacctgccgtgaatggccagagaggccggatcgattactactggagcgtgctgaagcctggcgagacactgaacgtggagagcaacggcaatctgatcgccccttggtacgcctacagattcgtgtccaccgatagaaagggcgccgtgttcaagagcaacctgcccatcgagaactgtgatgccacctgtcagacaattgccggggtgctgaggaccaataagaccttccagaacgtgtcccctctgtggatcggcgagtgccctaagtatgtgaagagcgagagcctgagactggccacaggcctgagaaacatcccccagagagagaccagaggactgtttggagccatcgccggattcatcgagggaggatggaccggaatgatcgatggctggtacggctaccaccacgagaatagccagggctctggatatgccgccgatagagagtctacccagaaggccatcgacggcatcaccaacaaggtgaacagcatcatcgacaagatgaacacccagttcgaggccgtggatcacgagttcagcaacctggagcggagaatcgacaacctgaacaagaggatggaggacggctttctggatgtgtggacctacaatgccgagctgctgatcctgctggaaaacgagaggaccctggacatgcacgacgccaacgtgaagaacctgtacgagaaggtgaagagccagctgagagacaacgccaacgatctgggcaatggctgcttcgagttctggcacaagtgtgacaacgactgtatcgagagcgtgaagaacggcacctataactaccccaagtaccaggccgagagcagactgaacaggcagaccatcgagtctgtgaagctggagaatctgggcgtgtatcagatcctggccatctacagcacagtgccttctagcctggtgctggtgggactgattctggccatgggagtgtggatgtgtagcaacggcagcatgcagtgccggatctgtatctgatgaacacgtgggatccagatctgctgtgccttctagttgccagccatctgttgtttgcccctcccccgtgccttccttgaccctggaaggtgccactcccactgtcctttcctaataaaatgaggaaattgcatcgcattgtctgagtaggtgtcattctattctggggggtggggtggggcaggacagcaagggggaggattgggaagacaatagcaggcatgctggggatgcggtgggctctatgggtacccaggtgctgaagaattgacccggttcctcctgggccagaaagaagcaggcacatccccttctctgtgacacaccctgtccacgcccctggttcttagttccagccccactcataggacactcatagctcaggagggctccgccttcaatcccacccgctaaagtacttggagcggtctctccctccctcatcagcccaccaaaccaaacctagcctccaagagtgggaagaaattaaagcaagataggctattaagtgcagagggagagaaaatgcctccaacatgtgaggaagtaatgagagaaatcatagaattttaaggccatgatttaaggccatcatggccttaatcttccgcttcctcgctcactgactcgctgcgctcggtcgttcggctgcggcgagcggtatcagctcactcaaaggcggtaatacggttatccacagaatcaggggataacgcaggaaagaacatgtgagcaaaaggccagcaaaaggccaggaaccgtaaaaaggccgcgttgctggcgtttttccataggctccgcccccctgacgagcatcacaaaaatcgacgctcaagtcagaggtggcgaaacccgacaggactataaagataccaggcgtttccccctggaagctccctcgtgcgctctcctgttccgaccctgccgcttaccggatacctgtccgcctttctcccttcgggaagcgtggcgctttctcatagctcacgctgtaggtatctcagttcggtgtaggtcgttcgctccaagctgggctgtgtgcacgaaccccccgttcagcccgaccgctgcgccttatccggtaactatcgtcttgagtccaacccggtaagacacgacttatcgccactggcagcagccactggtaacaggattagcagagcgaggtatgtaggcggtgctacagagttcttgaagtggtggcctaactacggctacactagaagaacagtatttggtatctgcgctctgctgaagccagttaccttcggaaaaagagttggtagctcttgatccggcaaacaaaccaccgctggtagcggtggtttttttgtttgcaagcagcagattacgcgcagaaaaaaaggatctcaagaagatcctttgatcttttctacggggtctgacgctcagtggaacgaaaactcacgttaagggattttggtcatgagattatcaaaaaggatcttcacctagatccttttaaattaaaaatgaagttttaaatcaatctaaagtatatatgagtaaacttggtctgacagttaccaatgcttaatcagtgaggcacctatctcagcgatctgtctatttcgttcatccatagttgcctgactcggggggggggggcgctgaggtctgcctcgtgaagaaggtgttgctgactcataccaggcctgaatcgccccatcatccagccagaaagtgagggagccacggttgatgagagctttgttgtaggtggaccagttggtgattttgaacttttgctttgccacggaacggtctgcgttgtcgggaagatgcgtgatctgatccttcaactcagcaaaagttcgatttattcaacaaagccgccgtcccgtcaagtcagcgtaatgctctgccagtgttacaaccaattaaccaattctgattagaaaaactcatcgagcatcaaatgaaactgcaatttattcatatcaggattatcaataccatatttttgaaaaagccgtttctgtaatgaaggagaaaactcaccgaggcagttccataggatggcaagatcctggtatcggtctgcgattccgactcgtccaacatcaatacaacctattaatttcccctcgtcaaaaataaggttatcaagtgagaaatcaccatgagtgacgactgaatccggtgagaatggcaaaagcttatgcatttctttccagacttgttcaacaggccagccattacgctcgtcatcaaaatcactcgcatcaaccaaaccgttattcattcgtgattgcgcctgagcgagacgaaatacgcgatcgctgttaaaaggacaattacaaacaggaatcgaatgcaaccggcgcaggaacactgccagcgcatcaacaatattttcacctgaatcaggatattcttctaatacctggaatgctgttttcccggggatcgcagtggtgagtaaccatgcatcatcaggagtacggataaaatgcttgatggtcggaagaggcataaattccgtcagccagtttagtctgaccatctcatctgtaacatcattggcaacgctacctttgccatgtttcagaaacaactctggcgcatcgggcttcccatacaatcgatagattgtcgcacctgattgcccgacattatcgcgagcccatttatacccatataaatcagcatccatgttggaatttaatcgcggcctcgagcaagacgtttcccgttgaatatggctcataacaccccttgtattactgtttatgtaagcagacagttttattgttcatgatgatatatttttatcttgtgcaatgtaacatcagagattttgagacacaacgtggctttccccccccccccattattgaagcatttatcagggttattgtctcatgagcggatacatatttgaatgtatttagaaaaataaacaaataggggttccgcgcacatttccccgaaaagtgccacctgacgtctaagaaaccattattatcatgacattaacctataaaaataggcgtatcacgaggccctttcgtc

SEQ ID NO: 93 - DNA, 6114 bp, Artificial Sequence
  Plasmid DNA: 54678
tcgcgcgtttcggtgatgacggtgaaaacctctgacacatgcagctcccggagacggtcacagcttgtctgtaagcggatgccgggagcagacaagcccgtcagggcgcgtcagcgggtgttggcgggtgtcggggctggcttaactatgcggcatcagagcagattgtactgagagtgcaccatatgcggtgtgaaataccgcacagatgcgtaaggagaaaataccgcatcagattggctattggccattgcatacgttgtatccatatcataatatgtacatttatattggctcatgtccaacattaccgccatgttgacattgattattgactagttattaatagtaatcaattacgggaacttccatagcccatatatggagttccgcgttacataacttacgggaatttccaaacctggctgaccgcccaacgacccccgcccattgacgtcaataatgacgtatgttcccatagtaacgccaatagggaacttccattgacgtcaatgggtggagtatttacggtaaactgcccacttgggaatttccaagtgtatcatatgccaagtacgccccctattgacgtcaatgacgggaacttccataagcttgcattatgcccagtacatgaccttatgggaatttcctacttggcagtacatctacgtattagtcatcgctattaccatggtgatgcggttttggcagtacatcaatgggcgtggatagcggtttgactcacgggaacttccaagtctccaccccattgacgtcaatgggagtttgttttgactcaccaaaatcaacgggaatttccaaaatgtcgtaacaactccgccccattgacgcaaatgggcggtaggcgtgtacggtgggaggtctatataagcagagctcgtttagtgaaccgtcagatcgcctggagacgccatccacgctgttttgacctccatagaagacaccgggaccgatccagcctccatcggctcgcatctctccttcacgcgcccgccgccctacctgaggccgccatccacgccggttgagtcgcgttctgccgcctcccgcctgtggtgcctcctgaactgcgtccgccgtctaggtaagtttaaagctcaggtcgagaccgggcctttgtccggcgctcccttggagcctacctagactcagccggctctccacgctttgcctgaccctgcttgctcaactctagttaacggtggagggcagtgtagtctgagcagtactcgttgctgccgcgcgcgccaccagacataatagctgacagactaacagactgttcctttccatgggtcttttctgcagtcaccgtcgtcgacacgtgtgatcagatatcgcggccgctctagagatatcgccaccatggccatcatctacctgatcctgctgtttacagctgtgagaggcgaccagatctgtatcggctaccacgccaacaatagcaccgagaaggtggacaccatcctggagagaaacgtgacagtgacccacgccaaggacatcctggaaaagacccacaacggcaagctgtgtaagctgaacggcatccctcctctggaactgggcgattgttctatcgccggatggctgctgggaaaccccgagtgtgataggctgctgtctgtgcctgagtggagctacatcatggagaaggagaaccctagggacggcctgtgttaccctggcagcttcaacgattacgaggagctgaagcacctgctgtctagcgtgaagcacttcgagaaggtgaagatcctgcccaaggacagatggacccagcacacaacaacaggaggaagcagagcctgcgccgtgtctggcaaccccagcttcttccggaatatggtgtggctgaccaagaagggcagcaattaccctgtggcccagggcagctacaataataccagcggcgagcagatgctgatcatctggggagtgcaccaccctaatgacgagaccgagcagagaaccctgtaccagaatgtgggcacctacgtgtctgtgggcaccagcaccctgaataagagaagcacccccgagattgccacaagacccaaggtgaacggccagggaggaagaatggagttcagctggaccctgctggatatgtgggacaccatcaactttgagagcaccggcaatctgatcgcccctgagtacggcttcaagatcagcaagagaggcagcagcggcatcatgaaaaccgagggcaccctggagaattgtgagaccaagtgccagacacctctgggcgccatcaataccaccctgcccttccacaatgtgcaccctctgaccatcggcgagtgccctaagtatgtgaagagcgagaagctggtgctggccacaggactgagaaacgtgccccagagagagacaagaggcctgtttggagccatcgccggattcatcgagggaggatggcagggaatggtcgatggctggtacggctaccaccacagcaatgatcagggctctggctatgccgccgataaggagtctacccagaaggcctttgacggcatcaccaacaaggtgaacagcgtgatcgagaagatgaacacccagtttgaggctgtgggcaaggagtttagcaacctggagcggagactggagaacctgaacaagaagatggaggacggcttcctggatgtgtggacctacaatgccgaactgctggtgctgatggagaatgagcggaccctggacttccacgacagcaacgtgaagaacctgtacgacaaagtgaggatgcagctgagggacaacgtgaaggaactgggcaatggctgcttcgagttctaccacaagtgtgacgacgagtgtatgaactccgtgaagaacggcacctacgactaccctaagtacgaggaggagagcaagctgaaccggaacgagatcaagggcgtgaagctgtctagcatgggcgtgtatcagatcctggccatctatgccacagtggccggatctctgagcctggcaattatgatggctggaatcagcttctggatgtgctccaatggcagcctgcagtgccggatctgtatctgatgaacacgtgggatccagatctgctgtgccttctagttgccagccatctgttgtttgcccctcccccgtgccttccttgaccctggaaggtgccactcccactgtcctttcctaataaaatgaggaaattgcatcgcattgtctgagtaggtgtcattctattctggggggtggggtggggcaggacagcaagggggaggattgggaagacaatagcaggcatgctggggatgcggtgggctctatgggtacccaggtgctgaagaattgacccggttcctcctgggccagaaagaagcaggcacatccccttctctgtgacacaccctgtccacgcccctggttcttagttccagccccactcataggacactcatagctcaggagggctccgccttcaatcccacccgctaaagtacttggagcggtctctccctccctcatcagcccaccaaaccaaacctagcctccaagagtgggaagaaattaaagcaagataggctattaagtgcagagggagagaaaatgcctccaacatgtgaggaagtaatgagagaaatcatagaattttaaggccatgatttaaggccatcatggccttaatcttccgcttcctcgctcactgactcgctgcgctcggtcgttcggctgcggcgagcggtatcagctcactcaaaggcggtaatacggttatccacagaatcaggggataacgcaggaaagaacatgtgagcaaaaggccagcaaaaggccaggaaccgtaaaaaggccgcgttgctggcgtttttccataggctccgcccccctgacgagcatcacaaaaatcgacgctcaagtcagaggtggcgaaacccgacaggactataaagataccaggcgtttccccctggaagctccctcgtgcgctctcctgttccgaccctgccgcttaccggatacctgtccgcctttctcccttcgggaagcgtggcgctttctcatagctcacgctgtaggtatctcagttcggtgtaggtcgttcgctccaagctgggctgtgtgcacgaaccccccgttcagcccgaccgctgcgccttatccggtaactatcgtcttgagtccaacccggtaagacacgacttatcgccactggcagcagccactggtaacaggattagcagagcgaggtatgtaggcggtgctacagagttcttgaagtggtggcctaactacggctacactagaagaacagtatttggtatctgcgctctgctgaagccagttaccttcggaaaaagagttggtagctcttgatccggcaaacaaaccaccgctggtagcggtggtttttttgtttgcaagcagcagattacgcgcagaaaaaaaggatctcaagaagatcctttgatcttttctacggggtctgacgctcagtggaacgaaaactcacgttaagggattttggtcatgagattatcaaaaaggatcttcacctagatccttttaaattaaaaatgaagttttaaatcaatctaaagtatatatgagtaaacttggtctgacagttaccaatgcttaatcagtgaggcacctatctcagcgatctgtctatttcgttcatccatagttgcctgactcggggggggggggcgctgaggtctgcctcgtgaagaaggtgttgctgactcataccaggcctgaatcgccccatcatccagccagaaagtgagggagccacggttgatgagagctttgttgtaggtggaccagttggtgattttgaacttttgctttgccacggaacggtctgcgttgtcgggaagatgcgtgatctgatccttcaactcagcaaaagttcgatttattcaacaaagccgccgtcccgtcaagtcagcgtaatgctctgccagtgttacaaccaattaaccaattctgattagaaaaactcatcgagcatcaaatgaaactgcaatttattcatatcaggattatcaataccatatttttgaaaaagccgtttctgtaatgaaggagaaaactcaccgaggcagttccataggatggcaagatcctggtatcggtctgcgattccgactcgtccaacatcaatacaacctattaatttcccctcgtcaaaaataaggttatcaagtgagaaatcaccatgagtgacgactgaatccggtgagaatggcaaaagcttatgcatttctttccagacttgttcaacaggccagccattacgctcgtcatcaaaatcactcgcatcaaccaaaccgttattcattcgtgattgcgcctgagcgagacgaaatacgcgatcgctgttaaaaggacaattacaaacaggaatcgaatgcaaccggcgcaggaacactgccagcgcatcaacaatattttcacctgaatcaggatattcttctaatacctggaatgctgttttcccggggatcgcagtggtgagtaaccatgcatcatcaggagtacggataaaatgcttgatggtcggaagaggcataaattccgtcagccagtttagtctgaccatctcatctgtaacatcattggcaacgctacctttgccatgtttcagaaacaactctggcgcatcgggcttcccatacaatcgatagattgtcgcacctgattgcccgacattatcgcgagcccatttatacccatataaatcagcatccatgttggaatttaatcgcggcctcgagcaagacgtttcccgttgaatatggctcataacaccccttgtattactgtttatgtaagcagacagttttattgttcatgatgatatatttttatcttgtgcaatgtaacatcagagattttgagacacaacgtggctttccccccccccccattattgaagcatttatcagggttattgtctcatgagcggatacatatttgaatgtatttagaaaaataaacaaataggggttccgcgcacatttccccgaaaagtgccacctgacgtctaagaaaccattattatcatgacattaacctataaaaataggcgtatcacgaggccctttcgtc

SEQ ID NO: 94 - DNA, 6123 bp, Artificial Sequence
  Plasmid DNA: 54679
tcgcgcgtttcggtgatgacggtgaaaacctctgacacatgcagctcccggagacggtcacagcttgtctgtaagcggatgccgggagcagacaagcccgtcagggcgcgtcagcgggtgttggcgggtgtcggggctggcttaactatgcggcatcagagcagattgtactgagagtgcaccatatgcggtgtgaaataccgcacagatgcgtaaggagaaaataccgcatcagattggctattggccattgcatacgttgtatccatatcataatatgtacatttatattggctcatgtccaacattaccgccatgttgacattgattattgactagttattaatagtaatcaattacgggaacttccatagcccatatatggagttccgcgttacataacttacgggaatttccaaacctggctgaccgcccaacgacccccgcccattgacgtcaataatgacgtatgttcccatagtaacgccaatagggaacttccattgacgtcaatgggtggagtatttacggtaaactgcccacttgggaatttccaagtgtatcatatgccaagtacgccccctattgacgtcaatgacgggaacttccataagcttgcattatgcccagtacatgaccttatgggaatttcctacttggcagtacatctacgtattagtcatcgctattaccatggtgatgcggttttggcagtacatcaatgggcgtggatagcggtttgactcacgggaacttccaagtctccaccccattgacgtcaatgggagtttgttttgactcaccaaaatcaacgggaatttccaaaatgtcgtaacaactccgccccattgacgcaaatgggcggtaggcgtgtacggtgggaggtctatataagcagagctcgtttagtgaaccgtcagatcgcctggagacgccatccacgctgttttgacctccatagaagacaccgggaccgatccagcctccatcggctcgcatctctccttcacgcgcccgccgccctacctgaggccgccatccacgccggttgagtcgcgttctgccgcctcccgcctgtggtgcctcctgaactgcgtccgccgtctaggtaagtttaaagctcaggtcgagaccgggcctttgtccggcgctcccttggagcctacctagactcagccggctctccacgctttgcctgaccctgcttgctcaactctagttaacggtggagggcagtgtagtctgagcagtactcgttgctgccgcgcgcgccaccagacataatagctgacagactaacagactgttcctttccatgggtcttttctgcagtcaccgtcgtcgacacgtgtgatcagatatcgcggccgctctagagatatcgccaccatggagaaaaccctgctgttcgccaccatctttctgtgtgtgaaggccgacgagatctgtatcggctacctgagcaacaacagcaccgacaaggtggacaccatcatcgagaacaacgtgaccgtgacaagctctgtggaactggtggagacagagcacaccggcagcttttgtagcatcaacggcaagcagcctatctctctgggcgattgctctttcgccggatggattctgggcaaccccatgtgtgatgacctgatcggcaagaccagctggagctacatcgtggagaagcccaaccctaccaacggcatctgttaccctggcatcctggagaatgaggaggagctgaggctgaagtttagcggcgtgctggagttcaataagttcgaggccttcaccagcaatggatggggagccgtgaattctggagccggagtgacagccgcctgtaagttcggcagcagcaacagcttcttccggaacatgatctggctgatccaccagagcggcacataccccgtgatcaagcggaccttcaacaacaccaagggcagggatgtgctggtggtgtggggaattcaccaccctgccaccctgaaagaacaccaggacctgtacaaaaaggacagcagctatgtggctgtgggcagcgagacctacaacaggagattcacccccgagatcagcacaagacccaaggtgaacggacaggccggaaggatgaccttctactggaccatcgtgaagcctggcgagagcatcaccttcgagagcaatggagcctttctggcccctagatacgccttcgagatcgtgtctgtgggcaatggcaagctgttccggagcgagctgaatatcgagagctgctccaccaagtgtcagacagaagtgggcggcatcaacaccaacaagagcttccacagcgtgcacagaaacaccatcggcgactgccccaagtacgtgaacgtgaagagcctgaagctggccacaggcctgagaaatgtgccccagagagagaccagaggactgtttggagccatcgccggattcatcgaaggaggatggcctggcctgatcaatggctggtacggcttccagcacagaaatgaggagggcacaggcattgccgccgataaggagtctacccagaaggccatcgaccagatcaccagcaaggtgaacaacatcgtggaccggatgaacaccaacttcgagagcgtgcagcacgagtttagcgagatcgaggagcggatcaacagactgagcaagcatgtggacgatagcgtggtggacatctggagctataacgcccagctgctggtgctgctggagaacgaaaagaccctggacctgcacgacagcaatgtgaggaacctgcacgagcgcgtgaggagaatgctgaaggacaacgccaaggatgagggcaatggctgcttcaccttctaccacaagtgtgacaacgagtgtatcgagaaagtgaggaacggcacctacgaccacaaggagttcgagaaggagagcaagatcaaccggcaggagatcgagggagtcaagctggatagcagcggcaacgtgtacaagatcctgagcatctacagctgtatcgccagctctctggtgctggccgccctgatcatgggctttatcctgtgggcctgtagcaatggctcctgccggtgtaccatctgtatctgatgaacacgtgggatccagatctgctgtgccttctagttgccagccatctgttgtttgcccctcccccgtgccttccttgaccctggaaggtgccactcccactgtcctttcctaataaaatgaggaaattgcatcgcattgtctgagtaggtgtcattctattctggggggtggggtggggcaggacagcaagggggaggattgggaagacaatagcaggcatgctggggatgcggtgggctctatgggtacccaggtgctgaagaattgacccggttcctcctgggccagaaagaagcaggcacatccccttctctgtgacacaccctgtccacgcccctggttcttagttccagccccactcataggacactcatagctcaggagggctccgccttcaatcccacccgctaaagtacttggagcggtctctccctccctcatcagcccaccaaaccaaacctagcctccaagagtgggaagaaattaaagcaagataggctattaagtgcagagggagagaaaatgcctccaacatgtgaggaagtaatgagagaaatcatagaattttaaggccatgatttaaggccatcatggccttaatcttccgcttcctcgctcactgactcgctgcgctcggtcgttcggctgcggcgagcggtatcagctcactcaaaggcggtaatacggttatccacagaatcaggggataacgcaggaaagaacatgtgagcaaaaggccagcaaaaggccaggaaccgtaaaaaggccgcgttgctggcgtttttccataggctccgcccccctgacgagcatcacaaaaatcgacgctcaagtcagaggtggcgaaacccgacaggactataaagataccaggcgtttccccctggaagctccctcgtgcgctctcctgttccgaccctgccgcttaccggatacctgtccgcctttctcccttcgggaagcgtggcgctttctcatagctcacgctgtaggtatctcagttcggtgtaggtcgttcgctccaagctgggctgtgtgcacgaaccccccgttcagcccgaccgctgcgccttatccggtaactatcgtcttgagtccaacccggtaagacacgacttatcgccactggcagcagccactggtaacaggattagcagagcgaggtatgtaggcggtgctacagagttcttgaagtggtggcctaactacggctacactagaagaacagtatttggtatctgcgctctgctgaagccagttaccttcggaaaaagagttggtagctcttgatccggcaaacaaaccaccgctggtagcggtggtttttttgtttgcaagcagcagattacgcgcagaaaaaaaggatctcaagaagatcctttgatcttttctacggggtctgacgctcagtggaacgaaaactcacgttaagggattttggtcatgagattatcaaaaaggatcttcacctagatccttttaaattaaaaatgaagttttaaatcaatctaaagtatatatgagtaaacttggtctgacagttaccaatgcttaatcagtgaggcacctatctcagcgatctgtctatttcgttcatccatagttgcctgactcggggggggggggcgctgaggtctgcctcgtgaagaaggtgttgctgactcataccaggcctgaatcgccccatcatccagccagaaagtgagggagccacggttgatgagagctttgttgtaggtggaccagttggtgattttgaacttttgctttgccacggaacggtctgcgttgtcgggaagatgcgtgatctgatccttcaactcagcaaaagttcgatttattcaacaaagccgccgtcccgtcaagtcagcgtaatgctctgccagtgttacaaccaattaaccaattctgattagaaaaactcatcgagcatcaaatgaaactgcaatttattcatatcaggattatcaataccatatttttgaaaaagccgtttctgtaatgaaggagaaaactcaccgaggcagttccataggatggcaagatcctggtatcggtctgcgattccgactcgtccaacatcaatacaacctattaatttcccctcgtcaaaaataaggttatcaagtgagaaatcaccatgagtgacgactgaatccggtgagaatggcaaaagcttatgcatttctttccagacttgttcaacaggccagccattacgctcgtcatcaaaatcactcgcatcaaccaaaccgttattcattcgtgattgcgcctgagcgagacgaaatacgcgatcgctgttaaaaggacaattacaaacaggaatcgaatgcaaccggcgcaggaacactgccagcgcatcaacaatattttcacctgaatcaggatattcttctaatacctggaatgctgttttcccggggatcgcagtggtgagtaaccatgcatcatcaggagtacggataaaatgcttgatggtcggaagaggcataaattccgtcagccagtttagtctgaccatctcatctgtaacatcattggcaacgctacctttgccatgtttcagaaacaactctggcgcatcgggcttcccatacaatcgatagattgtcgcacctgattgcccgacattatcgcgagcccatttatacccatataaatcagcatccatgttggaatttaatcgcggcctcgagcaagacgtttcccgttgaatatggctcataacaccccttgtattactgtttatgtaagcagacagttttattgttcatgatgatatatttttatcttgtgcaatgtaacatcagagattttgagacacaacgtggctttccccccccccccattattgaagcatttatcagggttattgtctcatgagcggatacatatttgaatgtatttagaaaaataaacaaataggggttccgcgcacatttccccgaaaagtgccacctgacgtctaagaaaccattattatcatgacattaacctataaaaataggcgtatcacgaggccctttcgtc

SEQ ID NO: 95 - DNA, 11374 bp, Artificial Sequence
  Plasmid DNA: 53500
aagctttactcgtaaagcgagttgaaggatcatatttagttgcgtttatgagataagattgaaagcacgtgtaaaatgtttcccgcgcgttggcacaactatttacaatgcggccaagttataaaagattctaatctgatatgttttaaaacacctttgcggcccgagttgtttgcgtacgtgactagcgaagaagatgtgtggaccgcagaacagatagtaaaacaaaaccctagtattggagcaataatcgatttaaccaacacgtctaaatattatgatggtgtgcattttttgcgggcgggcctgttatacaaaaaaattcaagtacctggccagactttgccgcctgaaagcatagttcaagaatttattgacacggtaaaagaatttacagaaaagtgtcccggcatgttggtgggcgtgcactgcacacacggtattaatcgcaccggttacatggtgtgcagatatttaatgcacaccctgggtattgcgccgcaggaagccatagatagattcgaaaaagccagaggtcacaaaattgaaagacaaaattacgttcaagatttattaatttaattaatattatttgcattctttaacaaatactttatcctattttcaaattgttgcgcttcttccagcgaaccaaaactatgcttcgcttgctccgtttagcttgtagccgatcagtggcgttgttccaatcgacggtaggattaggccggatattctccaccacaatgttggcaacgttgatgttacgtttatgcttttggttttccacgtacgtcttttggccggtaatagccgtaaacgtagtgccgtcgcgcgtcacgcacaacaccggatgtttgcgcttgtccgcggggtattgaaccgcgcgatccgacaaatccaccactttggcaactaaatcggtgacctgcgcgtcttttttctgcattatttcgtctttcttttgcatggtttcctggaagccggtgtacatgcggtttagatcagtcatgacgcgcgtgacctgcaaatctttggcctcgatctgcttgtccttgatggcaacgatgcgttcaataaactcttgttttttaacaagttcctcggttttttgcgccaccaccgcttgcagcgcgtttgtgtgctcggtgaatgtcgcaatcagcttagtcaccaactgtttgctctcctcctcccgttgtttgatcgcgggatcgtacttgccggtgcagagcacttgaggaattacttcttctaaaagccattcttgtaattctatggcgtaaggcaatttggacttcataatcagctgaatcacgccggatttagtaatgagcactgtatgcggctgcaaatacagcgggtcgccccttttcacgacgctgttagaggtagggcccccattttggatggtctgctcaaataacgatttgtatttattgtctacatgaacacgtatagctttatcacaaactgtatattttaaactgttagcgacgtccttggccacgaaccggacctgttggtcgcgctctagcacgtaccgcaggttgaacgtatcttctccaaatttaaattctccaattttaacgcgagccattttgatacacgtgtgtcgattttgcaacaactattgttttttaacgcaaactaaacttattgtggtaagcaataattaaatatgggggaacatgcgccgctacaacactcgtcgttatgaacgcagacggcgccggtctcggcgcaagcggctaaaacgtgttgcgcgttcaacgcggcaaacatcgcaaaagccaatagtacagttttgatttgcatattaacggcgattttttaaattatcttatttaataaatagttatgacgcctacaactccccgcccgcgttgactcgctgcacctcgagcagttcgttgacgccttcctccgtgtggccgaacacgtcgagcgggtggtcgatgaccagcggcgtgccgcacgcgacgcacaagtatctgtacaccgaatgatcgtcgggcgaaggcacgtcggcctccaagtggcaatattggcaaattcgaaaatatatacagttgggttgtttgcgcatatctatcgtggcgttgggcatgtacgtccgaacgttgatttgcatgcaagccgaaattaaatcattgcgattagtgcgattaaaacgttgtacatcctcgcttttaatcatgccgtcgattaaatcgcgcaatcgagtcaagtgatcaaagtgtggaataatgttttctttgtattcccgagtcaagcgcagcgcgtattttaacaaactagccatcttgtaagttagtttcatttaatgcaactttatccaataatatattatgtatcgcacgtcaagaattaacaatgcgcccgttgtcgcatctcaacacgactatgatagagatcaaataaagcgcgaattaaatagcttgcgacgcaacgtgcacgatctgtgcacgcgttccggcacgagctttgattgtaataagtttttacgaagcgatgacatgacccccgtagtgacaacgatcacgcccaaaagaactgccgactacaaaattaccgagtatgtcggtgacgttaaaactattaagccatccaatcgaccgttagtcgaatcaggaccgctggtgcgagaagccgcgaagtatggcgaatgcatcgtataacgtgtggagtccgctcattagagcgtcatgtttagacaagaaagctacatatttaattgatcccgatgattttattgataaattgaccctaactccatacacggtattctacaatggcggggttttggtcaaaatttccggactgcgattgtacatgctgttaacggctccgcccactattaatgaaattaaaaattccaattttaaaaaacgcagcaagagaaacatttgtatgaaagaatgcgtagaaggaaagaaaaatgtcgtcgacatgctgaacaacaagattaatatgcctccgtgtataaaaaaaatattgaacgatttgaaagaaaacaatgtaccgcgcggcggtatgtacaggaagaggtttatactaaactgttacattgcaaacgtggtttcgtgtgccaagtgtgaaaaccgatgtttaatcaaggctctgacgcatttctacaaccacgactccaagtgtgtgggtgaagtcatgcatcttttaatcaaatcccaagatgtgtataaaccaccaaactgccaaaaaatgaaaactgtcgacaagctctgtccgtttgctggcaactgcaagggtctcaatcctatttgtaattattgaataataaaacaattataaatgctaaatttgttttttattaacgatacaaaccaaacgcaacaagaacatttgtagtattatctataattgaaaacgcgtagttataatcgctgaggtaatatttaaaatcattttcaaatgattcacagttaatttgcgacaatataattttattttcacataaactagacgccttgtcgtcttcttcttcgtattccttctctttttcatttttctcctcataaaaattaacatagttattatcgtatccatatatgtatctatcgtatagagtaaattttttgttgtcataaatatatatgtcttttttaatggggtgtatagtaccgctgcgcatagtttttctgtaatttacaacagtgctattttctggtagttcttcggagtgtgttgctttaattattaaatttatataatcaatgaatttgggatcgtcggttttgtacaatatgttgccggcatagtacgcagcttcttctagttcaattacaccattttttagcagcaccggattaacataactttccaaaatgttgtacgaaccgttaaacaaaaacagttcacctcccttttctatactattgtctgcgagcagttgtttgttgttaaaaataacagccattgtaatgagacgcacaaactaatatcacaaactggaaatgtctatcaatatatagttgctgatatcatggagataattaaaatgataaccatctcgcaaataaataagtattttactgttttcgtaacagttttgtaataaaaaaacctataaatattccggattattcataccgtcccaccatcgggcgcggatctatgctactagtaaatcagtcacaccaaggcttcaataaggaacacacaagcaagatggtaagcgctattgttttatatgtgcttttggcggcggcggcgcattctgcctttgcggcggatcccgggaaccccgtgatttgtctgggacaccacgccgtgtctaatggcaccatggtgaaaaccctgaccgacgaccagatcgaagtggtgacagcccaggaactggtcgaatctcagcacctgcctgagctgtgtccttctcccctgagactggtggatggccagacctgtgacatcgtgaatggcgccctgggatctcctggatgtgaccacctgaatggagccgagtgggacgtgttcatcgagagacctaccgccgtggatacctgctaccccttcgacgtgcctgattaccagagcctgaggagcatcctggccaacaacggcaagttcgagttcatcgccgaggagttccagtggaacaccgtgaagcagaatggcaagagcggcgcctgtaaaagggccaacgtgaacgacttcttcaaccggctgaactggctgacaaagagcgatggcaacgcctaccctctgcagaatctgaccaaggtgaacaacggcgactacgccagactgtatatctggggcgtgcaccacccttctaccgataccgagcagaccaacctgtacaagaacaaccccggcagagtgacagtgagcacccagaccagccagacaagcgtggtgcctaacatcggaagcagaccttgggtgaggggactgagcagcaggatcagcttctactggaccatcgtggagcctggcgatctgatcgtgttcaacaccatcggcaacctgattgcccctaggggccactacaagctgaacagccagaagaagagcaccatcctgaataccgccgtgcctatcggctcttgtgtgagcaagtgccacaccgataagggcagcatcagcaccaccaagcccttccagaacatcagccggatcagcatcggcgattgccccaagtatgtgaagcagggcagcctgaaactggccaccggcatgagaaacatcccccagagagagaccagaggactgtttggagccatcgccggattcatcgagaatggctggcagggactgatcgatggctggtacggcttcagacaccagaatgccgagggaacaggaacagccgccgatctgaagtctacacaggccgccatcgaccagatcaacggcaagctgaaccggctgatcgagaagcccaacgagaagtaccaccagatcgagaaggaattcgagcaggtggagggcagaatccaggacctggagaagtacgtggaggacaccaagatcgacctgtggagctacaatgccgaactgctggtggccctggagaatcagcacaccatcgacgtgaccgacagcgagatgaacaagctgttcgagagagtgaggcaccagctgagagagaacgccgaggataagggcaatggctgcttcgagatcttccaccagtgtgacaacagctgtatcgagagcatccggaacggcacctacgatcacgacatctacagggacgaggccatcaacaaccggtttcagatccagagcggcagactggtgcctagaggatctcctggcagcggatatattcctgaggcccctagagatggacaggcctatgtgagaaaggatggcgaatgggtgctgctgtctacatttctgggacaccaccatcaccaccattgatgagcggccgctgcagatctgatcctttcctgggacccggcaagaaccaaaaactcactctcttcaaggaaatccgtaatgttaaacccgacacgatgaagcttgtcgttggatggaaaggaaaagagttctacagggaaacttggacccgcttcatggaagacagcttccccattgttaacgaccaagaagtgatggatgttttccttgttgtcaacatgcgtcccactagacccaaccgttgttacaaattcctggcccaacacgctctgcgttgcgaccccgactatgtacctcatgacgtgattaggatcgtcgagccttcatgggtgggcagcaacaacgagtaccgcatcagcctggctaagaagggcggcggctgcccaataatgaaccttcactctgagtacaccaactcgttcgaacagttcatcgatcgtgtcatctgggagaacttctacaagcccatcgtttacatcggtaccgactctgctgaagaggaggaaattctccttgaagtttccctggtgttcaaagtaaaggagtttgcaccagacgcacctctgttcactggtccggcgtattaaaacacgatacattgttattagtacatttattaagcgctagattctgtgcgttgttgatttacagacaattgttgtacgtattttaataattcattaaatttataatctttagggtggtatgttagagcgaaaatcaaatgattttcagcgtctttatatctgaatttaaatattaaatcctcaatagatttgtaaaataggtttcgattagtttcaaacaagggttgtttttccgaaccgatggctggactatctaatggattttcgctcaacgccacaaaacttgccaaatcttgtagcagcaatctagctttgtcgatattcgtttgtgttttgttttgtaataaaggttcgacgtcgttcaaaatattatgcgcttttgtatttctttcatcactgtcgttagtgtacaattgactcgacgtaaacacgttaaataaagcttggacatatttaacatcgggcgtgttagctttattaggccgattatcgtcgtcgtcccaaccctcgtcgttagaagttgcttccgaagacgattttgccatagccacacgacgcctattaattgtgtcggctaacacgtccgcgatcaaatttgtagttgagctttttggaattatttctgattgcgggcgtttttgggcgggtttcaatctaactgtgcccgattttaattcagacaacacgttagaaagcgatggtgcaggcggtggtaacatttcagacggcaaatctactaatggcggcggtggtggagctgatgataaatctaccatcggtggaggcgcaggcggggctggcggcggaggcggaggcggaggtggtggcggtgatgcagacggcggtttaggctcaaatgtctctttaggcaacacagtcggcacctcaactattgtactggtttcgggcgccgtttttggtttgaccggtctgagacgagtgcgatttttttcgtttctaatagcttccaacaattgttgtctgtcgtctaaaggtgcagcgggttgaggttccgtcggcattggtggagcgggcggcaattcagacatcgatggtggtggtggtggtggaggcgctggaatgttaggcacgggagaaggtggtggcggcggtgccgccggtataatttgttctggtttagtttgttcgcgcacgattgtgggcaccggcgcaggcgccgctggctgcacaacggaaggtcgtctgcttcgaggcagcgcttggggtggtggcaattcaatattataattggaatacaaatcgtaaaaatctgctataagcattgtaatttcgctatcgtttaccgtgccgatatttaacaaccgctcaatgtaagcaattgtattgtaaagagattgtctcaagctccgcacgccgataacaagccttttcatttttactacagcattgtagtggcgagacacttcgctgtcgtcgacgtacatgtatgctttgttgtcaaaaacgtcgttggcaagctttaaaatatttaaaagaacatctctgttcagcaccactgtgttgtcgtaaatgttgtttttgataatttgcgcttccgcagtatcgacacgttcaaaaaattgatgcgcatcaattttgttgttcctattattgaataaataagattgtacagattcatatctacgattcgtcatggccaccacaaatgctacgctgcaaacgctggtacaattttacgaaaactgcaaaaacgtcaaaactcggtataaaataatcaacgggcgctttggcaaaatatctattttatcgcacaagcccactagcaaattgtatttgcagaaaacaatttcggcgcacaattttaacgctgacgaaataaaagttcaccagttaatgagcgaccacccaaattttataaaaatctattttaatcacggttccatcaacaaccaagtgatcgtgatggactacattgactgtcccgatttatttgaaacactacaaattaaaggcgagctttcgtaccaacttgttagcaatattattagacagctgtgtgaagcgctcaacgatttgcacaagcacaatttcatacacaacgacataaaactcgaaaatgtcttatatttcgaagcacttgatcgcgtgtatgtttgcgattacggattgtgcaaacacgaaaactcacttagcgtgcacgacggcacgttggagtattttagtccggaaaaaattcgacacacaactatgcacgtttcgtttgactggtacgcggcgtgttaacatacaagttgctaaccggcggttcgtaatcatggtcatagctgtttcctgtgtgaaattgttatccgctcacaattccacacaacatacgagccggaagcataaagtgtaaagcctggggtgcctaatgagtgagctaactcacattaattgcgttgcgctcactgcccgctttccagtcgggaaacctgtcgtgccagctgcattaatgaatcggccaacgcgcggggagaggcggtttgcgtattgggcgctcttccgcttcctcgctcactgactcgctgcgctcggtcgttcggctgcggcgagcggtatcagctcactcaaaggcggtaatacggttatccacagaatcaggggataacgcaggaaagaacatgtgagcaaaaggccagcaaaaggccaggaaccgtaaaaaggccgcgttgctggcgtttttccataggctccgcccccctgacgagcatcacaaaaatcgacgctcaagtcagaggtggcgaaacccgacaggactataaagataccaggcgtttccccctggaagctccctcgtgcgctctcctgttccgaccctgccgcttaccggatacctgtccgcctttctcccttcgggaagcgtggcgctttctcatagctcacgctgtaggtatctcagttcggtgtaggtcgttcgctccaagctgggctgtgtgcacgaaccccccgttcagcccgaccgctgcgccttatccggtaactatcgtcttgagtccaacccggtaagacacgacttatcgccactggcagcagccactggtaacaggattagcagagcgaggtatgtaggcggtgctacagagttcttgaagtggtggcctaactacggctacactagaaggacagtatttggtatctgcgctctgctgaagccagttaccttcggaaaaagagttggtagctcttgatccggcaaacaaaccaccgctggtagcggtggtttttttgtttgcaagcagcagattacgcgcagaaaaaaaggatctcaagaagatcctttgatcttttctacggggtctgacgctcagtggaacgaaaactcacgttaagggattttggtcatgagattatcaaaaaggatcttcacctagatccttttaaattaaaaatgaagttttaaatcaatctaaagtatatatgagtaaacttggtctgacagttaccaatgcttaatcagtgaggcacctatctcagcgatctgtctatttcgttcatccatagttgcctgactccccgtcgtgtagataactacgatacgggagggcttaccatctggccccagtgctgcaatgataccgcgagacccacgctcaccggctccagatttatcagcaataaaccagccagccggaagggccgagcgcagaagtggtcctgcaactttatccgcctccatccagtctattaattgttgccgggaagctagagtaagtagttcgccagttaatagtttgcgcaacgttgttgccattgctacaggcatcgtggtgtcacgctcgtcgtttggtatggcttcattcagctccggttcccaacgatcaaggcgagttacatgatcccccatgttgtgcaaaaaagcggttagctccttcggtcctccgatcgttgtcagaagtaagttggccgcagtgttatcactcatggttatggcagcactgcataattctcttactgtcatgccatccgtaagatgcttttctgtgactggtgagtactcaaccaagtcattctgagaatagtgtatgcggcgaccgagttgctcttgcccggcgtcaatacgggataataccgcgccacatagcagaactttaaaagtgctcatcattggaaaacgttcttcggggcgaaaactctcaaggatcttaccgctgttgagatccagttcgatgtaacccactcgtgcacccaactgatcttcagcatcttttactttcaccagcgtttctgggtgagcaaaaacaggaaggcaaaatgccgcaaaaaagggaataagggcgacacggaaatgttgaatactcatactcttcctttttcaatattattgaagcatttatcagggttattgtctcatgagcggatacatatttgaatgtatttagaaaaataaacaaataggggttccgcgcacatttccccgaaaagtgccacctgacgtctaagaaaccattattatcatgacattaacctataaaaataggcgtatcacgaggccctttcgtctcgcgcgtttcggtgatgacggtgaaaacctctgacacatgcagctcccggagacggtcacagcttgtctgtaagcggatgccgggagcagacaagcccgtcagggcgcgtcagcgggtgttggcgggtgtcggggctggcttaactatgcggcatcagagcagattgtactgagagtgcaccatatgcggtgtgaaataccgcacagatgcgtaaggagaaaataccgcatcaggcgccattcgccattcaggctgcgcaactgttgggaagggcgatcggtgcgggcctcttcgctattacgccagctggcgaaagggggatgtgctgcaaggcgattaagttgggtaacgccagggttttcccagtcacgacgttgtaaaacgacggccagtgcc

SEQ ID NO: 96 - DNA, 11389 bp, Artificial Sequence
  Plasmid DNA: 53509
aagctttactcgtaaagcgagttgaaggatcatatttagttgcgtttatgagataagattgaaagcacgtgtaaaatgtttcccgcgcgttggcacaactatttacaatgcggccaagttataaaagattctaatctgatatgttttaaaacacctttgcggcccgagttgtttgcgtacgtgactagcgaagaagatgtgtggaccgcagaacagatagtaaaacaaaaccctagtattggagcaataatcgatttaaccaacacgtctaaatattatgatggtgtgcattttttgcgggcgggcctgttatacaaaaaaattcaagtacctggccagactttgccgcctgaaagcatagttcaagaatttattgacacggtaaaagaatttacagaaaagtgtcccggcatgttggtgggcgtgcactgcacacacggtattaatcgcaccggttacatggtgtgcagatatttaatgcacaccctgggtattgcgccgcaggaagccatagatagattcgaaaaagccagaggtcacaaaattgaaagacaaaattacgttcaagatttattaatttaattaatattatttgcattctttaacaaatactttatcctattttcaaattgttgcgcttcttccagcgaaccaaaactatgcttcgcttgctccgtttagcttgtagccgatcagtggcgttgttccaatcgacggtaggattaggccggatattctccaccacaatgttggcaacgttgatgttacgtttatgcttttggttttccacgtacgtcttttggccggtaatagccgtaaacgtagtgccgtcgcgcgtcacgcacaacaccggatgtttgcgcttgtccgcggggtattgaaccgcgcgatccgacaaatccaccactttggcaactaaatcggtgacctgcgcgtcttttttctgcattatttcgtctttcttttgcatggtttcctggaagccggtgtacatgcggtttagatcagtcatgacgcgcgtgacctgcaaatctttggcctcgatctgcttgtccttgatggcaacgatgcgttcaataaactcttgttttttaacaagttcctcggttttttgcgccaccaccgcttgcagcgcgtttgtgtgctcggtgaatgtcgcaatcagcttagtcaccaactgtttgctctcctcctcccgttgtttgatcgcgggatcgtacttgccggtgcagagcacttgaggaattacttcttctaaaagccattcttgtaattctatggcgtaaggcaatttggacttcataatcagctgaatcacgccggatttagtaatgagcactgtatgcggctgcaaatacagcgggtcgccccttttcacgacgctgttagaggtagggcccccattttggatggtctgctcaaataacgatttgtatttattgtctacatgaacacgtatagctttatcacaaactgtatattttaaactgttagcgacgtccttggccacgaaccggacctgttggtcgcgctctagcacgtaccgcaggttgaacgtatcttctccaaatttaaattctccaattttaacgcgagccattttgatacacgtgtgtcgattttgcaacaactattgttttttaacgcaaactaaacttattgtggtaagcaataattaaatatgggggaacatgcgccgctacaacactcgtcgttatgaacgcagacggcgccggtctcggcgcaagcggctaaaacgtgttgcgcgttcaacgcggcaaacatcgcaaaagccaatagtacagttttgatttgcatattaacggcgattttttaaattatcttatttaataaatagttatgacgcctacaactccccgcccgcgttgactcgctgcacctcgagcagttcgttgacgccttcctccgtgtggccgaacacgtcgagcgggtggtcgatgaccagcggcgtgccgcacgcgacgcacaagtatctgtacaccgaatgatcgtcgggcgaaggcacgtcggcctccaagtggcaatattggcaaattcgaaaatatatacagttgggttgtttgcgcatatctatcgtggcgttgggcatgtacgtccgaacgttgatttgcatgcaagccgaaattaaatcattgcgattagtgcgattaaaacgttgtacatcctcgcttttaatcatgccgtcgattaaatcgcgcaatcgagtcaagtgatcaaagtgtggaataatgttttctttgtattcccgagtcaagcgcagcgcgtattttaacaaactagccatcttgtaagttagtttcatttaatgcaactttatccaataatatattatgtatcgcacgtcaagaattaacaatgcgcccgttgtcgcatctcaacacgactatgatagagatcaaataaagcgcgaattaaatagcttgcgacgcaacgtgcacgatctgtgcacgcgttccggcacgagctttgattgtaataagtttttacgaagcgatgacatgacccccgtagtgacaacgatcacgcccaaaagaactgccgactacaaaattaccgagtatgtcggtgacgttaaaactattaagccatccaatcgaccgttagtcgaatcaggaccgctggtgcgagaagccgcgaagtatggcgaatgcatcgtataacgtgtggagtccgctcattagagcgtcatgtttagacaagaaagctacatatttaattgatcccgatgattttattgataaattgaccctaactccatacacggtattctacaatggcggggttttggtcaaaatttccggactgcgattgtacatgctgttaacggctccgcccactattaatgaaattaaaaattccaattttaaaaaacgcagcaagagaaacatttgtatgaaagaatgcgtagaaggaaagaaaaatgtcgtcgacatgctgaacaacaagattaatatgcctccgtgtataaaaaaaatattgaacgatttgaaagaaaacaatgtaccgcgcggcggtatgtacaggaagaggtttatactaaactgttacattgcaaacgtggtttcgtgtgccaagtgtgaaaaccgatgtttaatcaaggctctgacgcatttctacaaccacgactccaagtgtgtgggtgaagtcatgcatcttttaatcaaatcccaagatgtgtataaaccaccaaactgccaaaaaatgaaaactgtcgacaagctctgtccgtttgctggcaactgcaagggtctcaatcctatttgtaattattgaataataaaacaattataaatgctaaatttgttttttattaacgatacaaaccaaacgcaacaagaacatttgtagtattatctataattgaaaacgcgtagttataatcgctgaggtaatatttaaaatcattttcaaatgattcacagttaatttgcgacaatataattttattttcacataaactagacgccttgtcgtcttcttcttcgtattccttctctttttcatttttctcctcataaaaattaacatagttattatcgtatccatatatgtatctatcgtatagagtaaattttttgttgtcataaatatatatgtcttttttaatggggtgtatagtaccgctgcgcatagtttttctgtaatttacaacagtgctattttctggtagttcttcggagtgtgttgctttaattattaaatttatataatcaatgaatttgggatcgtcggttttgtacaatatgttgccggcatagtacgcagcttcttctagttcaattacaccattttttagcagcaccggattaacataactttccaaaatgttgtacgaaccgttaaacaaaaacagttcacctcccttttctatactattgtctgcgagcagttgtttgttgttaaaaataacagccattgtaatgagacgcacaaactaatatcacaaactggaaatgtctatcaatatatagttgctgatatcatggagataattaaaatgataaccatctcgcaaataaataagtattttactgttttcgtaacagttttgtaataaaaaaacctataaatattccggattattcataccgtcccaccatcgggcgcggatctatgctactagtaaatcagtcacaccaaggcttcaataaggaacacacaagcaagatggtaagcgctattgttttatatgtgcttttggcggcggcggcgcattctgcctttgcggcggatcccggggaccggatctgtatcggctaccagagcaacaacagcaccgacaccgtgaataccctgatcgagcagaacgtgcctgtgacccagacaatggaactggtggagaccgaaaagcaccccgcctactgtaatacagacctgggagcccctctggaactgagggactgtaagatcgaggccgtgatctacggcaaccccaagtgtgacatccacctgaaggatcagggctggagctacatcgtggagagacctagcgcccctgagggcatgtgttaccctggcagcgtggagaatctggaggagctgagattcgtgtttagcagcgccgccagctacaagaggatcaggctgttcgactacagcaggtggaacgtgacaagaagcggcaccagcaaggcctgtaatgccagcacaggcggccagagcttctacaggagcatcaactggctgaccaagaaggagcccgacacctacgatttcaacgagggcgcctacgtgaataacgaggacggcgacatcatctttctgtggggcatccaccaccctccagataccaaggagcagaccaccctgtacaagaacgccaacaccctgtctagcgtgaccaccaacaccatcaacaggagcttccagcccaatatcggccctagacctctggtgagaggccagcagggcagaatggattactactggggcatcctgaagagaggcgagaccctgaagatcaggaccaacggcaatctgatcgcccctgagtttggctatctgctgaagggcgagagctacggcagaatcatccagaacgaggacatccccatcggcaactgtaacaccaagtgccagacctatgccggagccatcaacagcagcaagcccttccagaatgccagcaggcactacatgggcgagtgccccaagtatgtgaagaaggccagcctgagactggctgtgggcctgagaaatacccctcagagggagaccagaggactgtttggagccatcgccggattcatcgagggaggatggagcggaatgatcgatggctggtacggcttccaccacagcaattctgagggcacaggaatggccgccgatcagaagtctacacaggaggccatcgacaagatcaccaacaaggtgaacaacatcgtggacaagatgaaccgggagttcgaggtggtgaaccacgagtttagcgaggtggagaagcggatcaacatgatcaacgacaagatcgacgaccagatcgaagatctgtgggcctacaatgccgaactgctggtgctgctggagaaccagaaaaccctggacgagcacgacagcaacgtgaagaacctgttcgacgaggtgaagaggagactgagcgccaatgccatcgatgccggaaacggctgctttgacatcctgcacaagtgtgataacgagtgtatggagaccatcaagaacggcacctacgaccacaaggagtatgaggaggaggccaagctggagaggagcaagatcaacagcggcagactggtgcctagaggatctcctggcagcggatatattcctgaggcccctagagatggacaggcctatgtgagaaaggatggcgaatgggtgctgctgtctacatttctgggacaccaccatcaccaccattgatgagcggccgctgcagatctgatcctttcctgggacccggcaagaaccaaaaactcactctcttcaaggaaatccgtaatgttaaacccgacacgatgaagcttgtcgttggatggaaaggaaaagagttctacagggaaacttggacccgcttcatggaagacagcttccccattgttaacgaccaagaagtgatggatgttttccttgttgtcaacatgcgtcccactagacccaaccgttgttacaaattcctggcccaacacgctctgcgttgcgaccccgactatgtacctcatgacgtgattaggatcgtcgagccttcatgggtgggcagcaacaacgagtaccgcatcagcctggctaagaagggcggcggctgcccaataatgaaccttcactctgagtacaccaactcgttcgaacagttcatcgatcgtgtcatctgggagaacttctacaagcccatcgtttacatcggtaccgactctgctgaagaggaggaaattctccttgaagtttccctggtgttcaaagtaaaggagtttgcaccagacgcacctctgttcactggtccggcgtattaaaacacgatacattgttattagtacatttattaagcgctagattctgtgcgttgttgatttacagacaattgttgtacgtattttaataattcattaaatttataatctttagggtggtatgttagagcgaaaatcaaatgattttcagcgtctttatatctgaatttaaatattaaatcctcaatagatttgtaaaataggtttcgattagtttcaaacaagggttgtttttccgaaccgatggctggactatctaatggattttcgctcaacgccacaaaacttgccaaatcttgtagcagcaatctagctttgtcgatattcgtttgtgttttgttttgtaataaaggttcgacgtcgttcaaaatattatgcgcttttgtatttctttcatcactgtcgttagtgtacaattgactcgacgtaaacacgttaaataaagcttggacatatttaacatcgggcgtgttagctttattaggccgattatcgtcgtcgtcccaaccctcgtcgttagaagttgcttccgaagacgattttgccatagccacacgacgcctattaattgtgtcggctaacacgtccgcgatcaaatttgtagttgagctttttggaattatttctgattgcgggcgtttttgggcgggtttcaatctaactgtgcccgattttaattcagacaacacgttagaaagcgatggtgcaggcggtggtaacatttcagacggcaaatctactaatggcggcggtggtggagctgatgataaatctaccatcggtggaggcgcaggcggggctggcggcggaggcggaggcggaggtggtggcggtgatgcagacggcggtttaggctcaaatgtctctttaggcaacacagtcggcacctcaactattgtactggtttcgggcgccgtttttggtttgaccggtctgagacgagtgcgatttttttcgtttctaatagcttccaacaattgttgtctgtcgtctaaaggtgcagcgggttgaggttccgtcggcattggtggagcgggcggcaattcagacatcgatggtggtggtggtggtggaggcgctggaatgttaggcacgggagaaggtggtggcggcggtgccgccggtataatttgttctggtttagtttgttcgcgcacgattgtgggcaccggcgcaggcgccgctggctgcacaacggaaggtcgtctgcttcgaggcagcgcttggggtggtggcaattcaatattataattggaatacaaatcgtaaaaatctgctataagcattgtaatttcgctatcgtttaccgtgccgatatttaacaaccgctcaatgtaagcaattgtattgtaaagagattgtctcaagctccgcacgccgataacaagccttttcatttttactacagcattgtagtggcgagacacttcgctgtcgtcgacgtacatgtatgctttgttgtcaaaaacgtcgttggcaagctttaaaatatttaaaagaacatctctgttcagcaccactgtgttgtcgtaaatgttgtttttgataatttgcgcttccgcagtatcgacacgttcaaaaaattgatgcgcatcaattttgttgttcctattattgaataaataagattgtacagattcatatctacgattcgtcatggccaccacaaatgctacgctgcaaacgctggtacaattttacgaaaactgcaaaaacgtcaaaactcggtataaaataatcaacgggcgctttggcaaaatatctattttatcgcacaagcccactagcaaattgtatttgcagaaaacaatttcggcgcacaattttaacgctgacgaaataaaagttcaccagttaatgagcgaccacccaaattttataaaaatctattttaatcacggttccatcaacaaccaagtgatcgtgatggactacattgactgtcccgatttatttgaaacactacaaattaaaggcgagctttcgtaccaacttgttagcaatattattagacagctgtgtgaagcgctcaacgatttgcacaagcacaatttcatacacaacgacataaaactcgaaaatgtcttatatttcgaagcacttgatcgcgtgtatgtttgcgattacggattgtgcaaacacgaaaactcacttagcgtgcacgacggcacgttggagtattttagtccggaaaaaattcgacacacaactatgcacgtttcgtttgactggtacgcggcgtgttaacatacaagttgctaaccggcggttcgtaatcatggtcatagctgtttcctgtgtgaaattgttatccgctcacaattccacacaacatacgagccggaagcataaagtgtaaagcctggggtgcctaatgagtgagctaactcacattaattgcgttgcgctcactgcccgctttccagtcgggaaacctgtcgtgccagctgcattaatgaatcggccaacgcgcggggagaggcggtttgcgtattgggcgctcttccgcttcctcgctcactgactcgctgcgctcggtcgttcggctgcggcgagcggtatcagctcactcaaaggcggtaatacggttatccacagaatcaggggataacgcaggaaagaacatgtgagcaaaaggccagcaaaaggccaggaaccgtaaaaaggccgcgttgctggcgtttttccataggctccgcccccctgacgagcatcacaaaaatcgacgctcaagtcagaggtggcgaaacccgacaggactataaagataccaggcgtttccccctggaagctccctcgtgcgctctcctgttccgaccctgccgcttaccggatacctgtccgcctttctcccttcgggaagcgtggcgctttctcatagctcacgctgtaggtatctcagttcggtgtaggtcgttcgctccaagctgggctgtgtgcacgaaccccccgttcagcccgaccgctgcgccttatccggtaactatcgtcttgagtccaacccggtaagacacgacttatcgccactggcagcagccactggtaacaggattagcagagcgaggtatgtaggcggtgctacagagttcttgaagtggtggcctaactacggctacactagaaggacagtatttggtatctgcgctctgctgaagccagttaccttcggaaaaagagttggtagctcttgatccggcaaacaaaccaccgctggtagcggtggtttttttgtttgcaagcagcagattacgcgcagaaaaaaaggatctcaagaagatcctttgatcttttctacggggtctgacgctcagtggaacgaaaactcacgttaagggattttggtcatgagattatcaaaaaggatcttcacctagatccttttaaattaaaaatgaagttttaaatcaatctaaagtatatatgagtaaacttggtctgacagttaccaatgcttaatcagtgaggcacctatctcagcgatctgtctatttcgttcatccatagttgcctgactccccgtcgtgtagataactacgatacgggagggcttaccatctggccccagtgctgcaatgataccgcgagacccacgctcaccggctccagatttatcagcaataaaccagccagccggaagggccgagcgcagaagtggtcctgcaactttatccgcctccatccagtctattaattgttgccgggaagctagagtaagtagttcgccagttaatagtttgcgcaacgttgttgccattgctacaggcatcgtggtgtcacgctcgtcgtttggtatggcttcattcagctccggttcccaacgatcaaggcgagttacatgatcccccatgttgtgcaaaaaagcggttagctccttcggtcctccgatcgttgtcagaagtaagttggccgcagtgttatcactcatggttatggcagcactgcataattctcttactgtcatgccatccgtaagatgcttttctgtgactggtgagtactcaaccaagtcattctgagaatagtgtatgcggcgaccgagttgctcttgcccggcgtcaatacgggataataccgcgccacatagcagaactttaaaagtgctcatcattggaaaacgttcttcggggcgaaaactctcaaggatcttaccgctgttgagatccagttcgatgtaacccactcgtgcacccaactgatcttcagcatcttttactttcaccagcgtttctgggtgagcaaaaacaggaaggcaaaatgccgcaaaaaagggaataagggcgacacggaaatgttgaatactcatactcttcctttttcaatattattgaagcatttatcagggttattgtctcatgagcggatacatatttgaatgtatttagaaaaataaacaaataggggttccgcgcacatttccccgaaaagtgccacctgacgtctaagaaaccattattatcatgacattaacctataaaaataggcgtatcacgaggccctttcgtctcgcgcgtttcggtgatgacggtgaaaacctctgacacatgcagctcccggagacggtcacagcttgtctgtaagcggatgccgggagcagacaagcccgtcagggcgcgtcagcgggtgttggcgggtgtcggggctggcttaactatgcggcatcagagcagattgtactgagagtgcaccatatgcggtgtgaaataccgcacagatgcgtaaggagaaaataccgcatcaggcgccattcgccattcaggctgcgcaactgttgggaagggcgatcggtgcgggcctcttcgctattacgccagctggcgaaagggggatgtgctgcaaggcgattaagttgggtaacgccagggttttcccagtcacgacgttgtaaaacgacggccagtgcc

SEQ ID NO: 97 - DNA, 11398 bp, Artificial Sequence
  Plasmid DNA: 53513
aagctttactcgtaaagcgagttgaaggatcatatttagttgcgtttatgagataagattgaaagcacgtgtaaaatgtttcccgcgcgttggcacaactatttacaatgcggccaagttataaaagattctaatctgatatgttttaaaacacctttgcggcccgagttgtttgcgtacgtgactagcgaagaagatgtgtggaccgcagaacagatagtaaaacaaaaccctagtattggagcaataatcgatttaaccaacacgtctaaatattatgatggtgtgcattttttgcgggcgggcctgttatacaaaaaaattcaagtacctggccagactttgccgcctgaaagcatagttcaagaatttattgacacggtaaaagaatttacagaaaagtgtcccggcatgttggtgggcgtgcactgcacacacggtattaatcgcaccggttacatggtgtgcagatatttaatgcacaccctgggtattgcgccgcaggaagccatagatagattcgaaaaagccagaggtcacaaaattgaaagacaaaattacgttcaagatttattaatttaattaatattatttgcattctttaacaaatactttatcctattttcaaattgttgcgcttcttccagcgaaccaaaactatgcttcgcttgctccgtttagcttgtagccgatcagtggcgttgttccaatcgacggtaggattaggccggatattctccaccacaatgttggcaacgttgatgttacgtttatgcttttggttttccacgtacgtcttttggccggtaatagccgtaaacgtagtgccgtcgcgcgtcacgcacaacaccggatgtttgcgcttgtccgcggggtattgaaccgcgcgatccgacaaatccaccactttggcaactaaatcggtgacctgcgcgtcttttttctgcattatttcgtctttcttttgcatggtttcctggaagccggtgtacatgcggtttagatcagtcatgacgcgcgtgacctgcaaatctttggcctcgatctgcttgtccttgatggcaacgatgcgttcaataaactcttgttttttaacaagttcctcggttttttgcgccaccaccgcttgcagcgcgtttgtgtgctcggtgaatgtcgcaatcagcttagtcaccaactgtttgctctcctcctcccgttgtttgatcgcgggatcgtacttgccggtgcagagcacttgaggaattacttcttctaaaagccattcttgtaattctatggcgtaaggcaatttggacttcataatcagctgaatcacgccggatttagtaatgagcactgtatgcggctgcaaatacagcgggtcgccccttttcacgacgctgttagaggtagggcccccattttggatggtctgctcaaataacgatttgtatttattgtctacatgaacacgtatagctttatcacaaactgtatattttaaactgttagcgacgtccttggccacgaaccggacctgttggtcgcgctctagcacgtaccgcaggttgaacgtatcttctccaaatttaaattctccaattttaacgcgagccattttgatacacgtgtgtcgattttgcaacaactattgttttttaacgcaaactaaacttattgtggtaagcaataattaaatatgggggaacatgcgccgctacaacactcgtcgttatgaacgcagacggcgccggtctcggcgcaagcggctaaaacgtgttgcgcgttcaacgcggcaaacatcgcaaaagccaatagtacagttttgatttgcatattaacggcgattttttaaattatcttatttaataaatagttatgacgcctacaactccccgcccgcgttgactcgctgcacctcgagcagttcgttgacgccttcctccgtgtggccgaacacgtcgagcgggtggtcgatgaccagcggcgtgccgcacgcgacgcacaagtatctgtacaccgaatgatcgtcgggcgaaggcacgtcggcctccaagtggcaatattggcaaattcgaaaatatatacagttgggttgtttgcgcatatctatcgtggcgttgggcatgtacgtccgaacgttgatttgcatgcaagccgaaattaaatcattgcgattagtgcgattaaaacgttgtacatcctcgcttttaatcatgccgtcgattaaatcgcgcaatcgagtcaagtgatcaaagtgtggaataatgttttctttgtattcccgagtcaagcgcagcgcgtattttaacaaactagccatcttgtaagttagtttcatttaatgcaactttatccaataatatattatgtatcgcacgtcaagaattaacaatgcgcccgttgtcgcatctcaacacgactatgatagagatcaaataaagcgcgaattaaatagcttgcgacgcaacgtgcacgatctgtgcacgcgttccggcacgagctttgattgtaataagtttttacgaagcgatgacatgacccccgtagtgacaacgatcacgcccaaaagaactgccgactacaaaattaccgagtatgtcggtgacgttaaaactattaagccatccaatcgaccgttagtcgaatcaggaccgctggtgcgagaagccgcgaagtatggcgaatgcatcgtataacgtgtggagtccgctcattagagcgtcatgtttagacaagaaagctacatatttaattgatcccgatgattttattgataaattgaccctaactccatacacggtattctacaatggcggggttttggtcaaaatttccggactgcgattgtacatgctgttaacggctccgcccactattaatgaaattaaaaattccaattttaaaaaacgcagcaagagaaacatttgtatgaaagaatgcgtagaaggaaagaaaaatgtcgtcgacatgctgaacaacaagattaatatgcctccgtgtataaaaaaaatattgaacgatttgaaagaaaacaatgtaccgcgcggcggtatgtacaggaagaggtttatactaaactgttacattgcaaacgtggtttcgtgtgccaagtgtgaaaaccgatgtttaatcaaggctctgacgcatttctacaaccacgactccaagtgtgtgggtgaagtcatgcatcttttaatcaaatcccaagatgtgtataaaccaccaaactgccaaaaaatgaaaactgtcgacaagctctgtccgtttgctggcaactgcaagggtctcaatcctatttgtaattattgaataataaaacaattataaatgctaaatttgttttttattaacgatacaaaccaaacgcaacaagaacatttgtagtattatctataattgaaaacgcgtagttataatcgctgaggtaatatttaaaatcattttcaaatgattcacagttaatttgcgacaatataattttattttcacataaactagacgccttgtcgtcttcttcttcgtattccttctctttttcatttttctcctcataaaaattaacatagttattatcgtatccatatatgtatctatcgtatagagtaaattttttgttgtcataaatatatatgtcttttttaatggggtgtatagtaccgctgcgcatagtttttctgtaatttacaacagtgctattttctggtagttcttcggagtgtgttgctttaattattaaatttatataatcaatgaatttgggatcgtcggttttgtacaatatgttgccggcatagtacgcagcttcttctagttcaattacaccattttttagcagcaccggattaacataactttccaaaatgttgtacgaaccgttaaacaaaaacagttcacctcccttttctatactattgtctgcgagcagttgtttgttgttaaaaataacagccattgtaatgagacgcacaaactaatatcacaaactggaaatgtctatcaatatatagttgctgatatcatggagataattaaaatgataaccatctcgcaaataaataagtattttactgttttcgtaacagttttgtaataaaaaaacctataaatattccggattattcataccgtcccaccatcgggcgcggatctatgctactagtaaatcagtcacaccaaggcttcaataaggaacacacaagcaagatggtaagcgctattgttttatatgtgcttttggcggcggcggcgcattctgcctttgcggcggatcccggggacaagatctgtctgggacaccacgccgtggccaatggcaccaaggtgaacaccctgacagagaagggagtggaggtggtgaatgccacagagaccgtggagatcaccggcatcaacaaagtgtgtaccaagggcaagaaagccgtggatctgggcagctgtggcatcctgggcacaatcatcggacccccccagtgtgatagccacctgaagttcaaggccgacctgatcatcgagcggagaaacagcagcgacatctgctaccctggcaagttcaccaatgaggaggccctgagacagatcatcagagagagcggcggcatcgacaaagaacccatgggcttcaggtacagcggcatcaagacagatggagccacctccgcctgtaagagaaccgtgtccagcttctacagcgagatgaagtggctgctgtccagcaaagccaaccaggtgttcccccagctgaaccagacctaccggaacaacagaaaggagcccgccctgattgtctggggagtgcaccacagctctagcctggacgagcagaacaagctgtatggcgccggaaacaagctgatcacagtgggcagcagcaagtaccagcagagcttcagcccttctcctggcgataggcctaaggtgaacggacaggccggaagaatcgacttccactggatgctgctggaccctggcgataccgtgaccttcaccttcaacggcgcctttatcgcccctgatagggccaccttcctgagaagcaatgcccctagcggcgtggagtataacggcaagagcctgggcattcagagcgatgcccagatcgatgagtcttgtgagggcgagtgcttttactctggcggcaccatcaatagccctctgcccttccagaacatcgatagctgggctgtgggaagatgtcccagatacgtgaagcagagcagcctgcctctggccctgggcatgaagaatgtgccccagagagagaccagaggactgtttggagccatcgccggattcatcgagaatggctgggagggactgatcgatggctggtacggcttcagacaccagaatgcccagggacagggaacagccgccgattacaagtctacacaggccgctattgaccagatcacaggcaagctgaaccggctgatcgagaaaaccaacacccagttcgagctgatcgacaacgagttcaccgaggtggagcagcagatcggcaacgtgatcaactggaccagagacagcctgaccgagatctggagctacaatgccgaactgctggtggccatggagaatcagcacaccatcgacctggccgactccgagatgaataagctgtacgagagagtgaggaggcagctgagagagaatgccgaggaggacggcacaggctgcttcgagatcttccacagatgtgacgaccagtgtatggagagcatcaggaacaacacctacaaccacaccgagtacagacaggaagccctgcagaaccggatcatgatcaacagcggcagactggtgcctagaggatctcctggcagcggatatattcctgaggcccctagagatggacaggcctatgtgagaaaggatggcgaatgggtgctgctgtctacatttctgggacaccaccatcaccaccattgatgagcggccgctgcagatctgatcctttcctgggacccggcaagaaccaaaaactcactctcttcaaggaaatccgtaatgttaaacccgacacgatgaagcttgtcgttggatggaaaggaaaagagttctacagggaaacttggacccgcttcatggaagacagcttccccattgttaacgaccaagaagtgatggatgttttccttgttgtcaacatgcgtcccactagacccaaccgttgttacaaattcctggcccaacacgctctgcgttgcgaccccgactatgtacctcatgacgtgattaggatcgtcgagccttcatgggtgggcagcaacaacgagtaccgcatcagcctggctaagaagggcggcggctgcccaataatgaaccttcactctgagtacaccaactcgttcgaacagttcatcgatcgtgtcatctgggagaacttctacaagcccatcgtttacatcggtaccgactctgctgaagaggaggaaattctccttgaagtttccctggtgttcaaagtaaaggagtttgcaccagacgcacctctgttcactggtccggcgtattaaaacacgatacattgttattagtacatttattaagcgctagattctgtgcgttgttgatttacagacaattgttgtacgtattttaataattcattaaatttataatctttagggtggtatgttagagcgaaaatcaaatgattttcagcgtctttatatctgaatttaaatattaaatcctcaatagatttgtaaaataggtttcgattagtttcaaacaagggttgtttttccgaaccgatggctggactatctaatggattttcgctcaacgccacaaaacttgccaaatcttgtagcagcaatctagctttgtcgatattcgtttgtgttttgttttgtaataaaggttcgacgtcgttcaaaatattatgcgcttttgtatttctttcatcactgtcgttagtgtacaattgactcgacgtaaacacgttaaataaagcttggacatatttaacatcgggcgtgttagctttattaggccgattatcgtcgtcgtcccaaccctcgtcgttagaagttgcttccgaagacgattttgccatagccacacgacgcctattaattgtgtcggctaacacgtccgcgatcaaatttgtagttgagctttttggaattatttctgattgcgggcgtttttgggcgggtttcaatctaactgtgcccgattttaattcagacaacacgttagaaagcgatggtgcaggcggtggtaacatttcagacggcaaatctactaatggcggcggtggtggagctgatgataaatctaccatcggtggaggcgcaggcggggctggcggcggaggcggaggcggaggtggtggcggtgatgcagacggcggtttaggctcaaatgtctctttaggcaacacagtcggcacctcaactattgtactggtttcgggcgccgtttttggtttgaccggtctgagacgagtgcgatttttttcgtttctaatagcttccaacaattgttgtctgtcgtctaaaggtgcagcgggttgaggttccgtcggcattggtggagcgggcggcaattcagacatcgatggtggtggtggtggtggaggcgctggaatgttaggcacgggagaaggtggtggcggcggtgccgccggtataatttgttctggtttagtttgttcgcgcacgattgtgggcaccggcgcaggcgccgctggctgcacaacggaaggtcgtctgcttcgaggcagcgcttggggtggtggcaattcaatattataattggaatacaaatcgtaaaaatctgctataagcattgtaatttcgctatcgtttaccgtgccgatatttaacaaccgctcaatgtaagcaattgtattgtaaagagattgtctcaagctccgcacgccgataacaagccttttcatttttactacagcattgtagtggcgagacacttcgctgtcgtcgacgtacatgtatgctttgttgtcaaaaacgtcgttggcaagctttaaaatatttaaaagaacatctctgttcagcaccactgtgttgtcgtaaatgttgtttttgataatttgcgcttccgcagtatcgacacgttcaaaaaattgatgcgcatcaattttgttgttcctattattgaataaataagattgtacagattcatatctacgattcgtcatggccaccacaaatgctacgctgcaaacgctggtacaattttacgaaaactgcaaaaacgtcaaaactcggtataaaataatcaacgggcgctttggcaaaatatctattttatcgcacaagcccactagcaaattgtatttgcagaaaacaatttcggcgcacaattttaacgctgacgaaataaaagttcaccagttaatgagcgaccacccaaattttataaaaatctattttaatcacggttccatcaacaaccaagtgatcgtgatggactacattgactgtcccgatttatttgaaacactacaaattaaaggcgagctttcgtaccaacttgttagcaatattattagacagctgtgtgaagcgctcaacgatttgcacaagcacaatttcatacacaacgacataaaactcgaaaatgtcttatatttcgaagcacttgatcgcgtgtatgtttgcgattacggattgtgcaaacacgaaaactcacttagcgtgcacgacggcacgttggagtattttagtccggaaaaaattcgacacacaactatgcacgtttcgtttgactggtacgcggcgtgttaacatacaagttgctaaccggcggttcgtaatcatggtcatagctgtttcctgtgtgaaattgttatccgctcacaattccacacaacatacgagccggaagcataaagtgtaaagcctggggtgcctaatgagtgagctaactcacattaattgcgttgcgctcactgcccgctttccagtcgggaaacctgtcgtgccagctgcattaatgaatcggccaacgcgcggggagaggcggtttgcgtattgggcgctcttccgcttcctcgctcactgactcgctgcgctcggtcgttcggctgcggcgagcggtatcagctcactcaaaggcggtaatacggttatccacagaatcaggggataacgcaggaaagaacatgtgagcaaaaggccagcaaaaggccaggaaccgtaaaaaggccgcgttgctggcgtttttccataggctccgcccccctgacgagcatcacaaaaatcgacgctcaagtcagaggtggcgaaacccgacaggactataaagataccaggcgtttccccctggaagctccctcgtgcgctctcctgttccgaccctgccgcttaccggatacctgtccgcctttctcccttcgggaagcgtggcgctttctcatagctcacgctgtaggtatctcagttcggtgtaggtcgttcgctccaagctgggctgtgtgcacgaaccccccgttcagcccgaccgctgcgccttatccggtaactatcgtcttgagtccaacccggtaagacacgacttatcgccactggcagcagccactggtaacaggattagcagagcgaggtatgtaggcggtgctacagagttcttgaagtggtggcctaactacggctacactagaaggacagtatttggtatctgcgctctgctgaagccagttaccttcggaaaaagagttggtagctcttgatccggcaaacaaaccaccgctggtagcggtggtttttttgtttgcaagcagcagattacgcgcagaaaaaaaggatctcaagaagatcctttgatcttttctacggggtctgacgctcagtggaacgaaaactcacgttaagggattttggtcatgagattatcaaaaaggatcttcacctagatccttttaaattaaaaatgaagttttaaatcaatctaaagtatatatgagtaaacttggtctgacagttaccaatgcttaatcagtgaggcacctatctcagcgatctgtctatttcgttcatccatagttgcctgactccccgtcgtgtagataactacgatacgggagggcttaccatctggccccagtgctgcaatgataccgcgagacccacgctcaccggctccagatttatcagcaataaaccagccagccggaagggccgagcgcagaagtggtcctgcaactttatccgcctccatccagtctattaattgttgccgggaagctagagtaagtagttcgccagttaatagtttgcgcaacgttgttgccattgctacaggcatcgtggtgtcacgctcgtcgtttggtatggcttcattcagctccggttcccaacgatcaaggcgagttacatgatcccccatgttgtgcaaaaaagcggttagctccttcggtcctccgatcgttgtcagaagtaagttggccgcagtgttatcactcatggttatggcagcactgcataattctcttactgtcatgccatccgtaagatgcttttctgtgactggtgagtactcaaccaagtcattctgagaatagtgtatgcggcgaccgagttgctcttgcccggcgtcaatacgggataataccgcgccacatagcagaactttaaaagtgctcatcattggaaaacgttcttcggggcgaaaactctcaaggatcttaccgctgttgagatccagttcgatgtaacccactcgtgcacccaactgatcttcagcatcttttactttcaccagcgtttctgggtgagcaaaaacaggaaggcaaaatgccgcaaaaaagggaataagggcgacacggaaatgttgaatactcatactcttcctttttcaatattattgaagcatttatcagggttattgtctcatgagcggatacatatttgaatgtatttagaaaaataaacaaataggggttccgcgcacatttccccgaaaagtgccacctgacgtctaagaaaccattattatcatgacattaacctataaaaataggcgtatcacgaggccctttcgtctcgcgcgtttcggtgatgacggtgaaaacctctgacacatgcagctcccggagacggtcacagcttgtctgtaagcggatgccgggagcagacaagcccgtcagggcgcgtcagcgggtgttggcgggtgtcggggctggcttaactatgcggcatcagagcagattgtactgagagtgcaccatatgcggtgtgaaataccgcacagatgcgtaaggagaaaataccgcatcaggcgccattcgccattcaggctgcgcaactgttgggaagggcgatcggtgcgggcctcttcgctattacgccagctggcgaaagggggatgtgctgcaaggcgattaagttgggtaacgccagggttttcccagtcacgacgttgtaaaacgacggccagtgcc

SEQ ID NO: 98 - DNA, 11374 bp, Artificial Sequence
  Plasmid DNA: 53514
aagctttactcgtaaagcgagttgaaggatcatatttagttgcgtttatgagataagattgaaagcacgtgtaaaatgtttcccgcgcgttggcacaactatttacaatgcggccaagttataaaagattctaatctgatatgttttaaaacacctttgcggcccgagttgtttgcgtacgtgactagcgaagaagatgtgtggaccgcagaacagatagtaaaacaaaaccctagtattggagcaataatcgatttaaccaacacgtctaaatattatgatggtgtgcattttttgcgggcgggcctgttatacaaaaaaattcaagtacctggccagactttgccgcctgaaagcatagttcaagaatttattgacacggtaaaagaatttacagaaaagtgtcccggcatgttggtgggcgtgcactgcacacacggtattaatcgcaccggttacatggtgtgcagatatttaatgcacaccctgggtattgcgccgcaggaagccatagatagattcgaaaaagccagaggtcacaaaattgaaagacaaaattacgttcaagatttattaatttaattaatattatttgcattctttaacaaatactttatcctattttcaaattgttgcgcttcttccagcgaaccaaaactatgcttcgcttgctccgtttagcttgtagccgatcagtggcgttgttccaatcgacggtaggattaggccggatattctccaccacaatgttggcaacgttgatgttacgtttatgcttttggttttccacgtacgtcttttggccggtaatagccgtaaacgtagtgccgtcgcgcgtcacgcacaacaccggatgtttgcgcttgtccgcggggtattgaaccgcgcgatccgacaaatccaccactttggcaactaaatcggtgacctgcgcgtcttttttctgcattatttcgtctttcttttgcatggtttcctggaagccggtgtacatgcggtttagatcagtcatgacgcgcgtgacctgcaaatctttggcctcgatctgcttgtccttgatggcaacgatgcgttcaataaactcttgttttttaacaagttcctcggttttttgcgccaccaccgcttgcagcgcgtttgtgtgctcggtgaatgtcgcaatcagcttagtcaccaactgtttgctctcctcctcccgttgtttgatcgcgggatcgtacttgccggtgcagagcacttgaggaattacttcttctaaaagccattcttgtaattctatggcgtaaggcaatttggacttcataatcagctgaatcacgccggatttagtaatgagcactgtatgcggctgcaaatacagcgggtcgccccttttcacgacgctgttagaggtagggcccccattttggatggtctgctcaaataacgatttgtatttattgtctacatgaacacgtatagctttatcacaaactgtatattttaaactgttagcgacgtccttggccacgaaccggacctgttggtcgcgctctagcacgtaccgcaggttgaacgtatcttctccaaatttaaattctccaattttaacgcgagccattttgatacacgtgtgtcgattttgcaacaactattgttttttaacgcaaactaaacttattgtggtaagcaataattaaatatgggggaacatgcgccgctacaacactcgtcgttatgaacgcagacggcgccggtctcggcgcaagcggctaaaacgtgttgcgcgttcaacgcggcaaacatcgcaaaagccaatagtacagttttgatttgcatattaacggcgattttttaaattatcttatttaataaatagttatgacgcctacaactccccgcccgcgttgactcgctgcacctcgagcagttcgttgacgccttcctccgtgtggccgaacacgtcgagcgggtggtcgatgaccagcggcgtgccgcacgcgacgcacaagtatctgtacaccgaatgatcgtcgggcgaaggcacgtcggcctccaagtggcaatattggcaaattcgaaaatatatacagttgggttgtttgcgcatatctatcgtggcgttgggcatgtacgtccgaacgttgatttgcatgcaagccgaaattaaatcattgcgattagtgcgattaaaacgttgtacatcctcgcttttaatcatgccgtcgattaaatcgcgcaatcgagtcaagtgatcaaagtgtggaataatgttttctttgtattcccgagtcaagcgcagcgcgtattttaacaaactagccatcttgtaagttagtttcatttaatgcaactttatccaataatatattatgtatcgcacgtcaagaattaacaatgcgcccgttgtcgcatctcaacacgactatgatagagatcaaataaagcgcgaattaaatagcttgcgacgcaacgtgcacgatctgtgcacgcgttccggcacgagctttgattgtaataagtttttacgaagcgatgacatgacccccgtagtgacaacgatcacgcccaaaagaactgccgactacaaaattaccgagtatgtcggtgacgttaaaactattaagccatccaatcgaccgttagtcgaatcaggaccgctggtgcgagaagccgcgaagtatggcgaatgcatcgtataacgtgtggagtccgctcattagagcgtcatgtttagacaagaaagctacatatttaattgatcccgatgattttattgataaattgaccctaactccatacacggtattctacaatggcggggttttggtcaaaatttccggactgcgattgtacatgctgttaacggctccgcccactattaatgaaattaaaaattccaattttaaaaaacgcagcaagagaaacatttgtatgaaagaatgcgtagaaggaaagaaaaatgtcgtcgacatgctgaacaacaagattaatatgcctccgtgtataaaaaaaatattgaacgatttgaaagaaaacaatgtaccgcgcggcggtatgtacaggaagaggtttatactaaactgttacattgcaaacgtggtttcgtgtgccaagtgtgaaaaccgatgtttaatcaaggctctgacgcatttctacaaccacgactccaagtgtgtgggtgaagtcatgcatcttttaatcaaatcccaagatgtgtataaaccaccaaactgccaaaaaatgaaaactgtcgacaagctctgtccgtttgctggcaactgcaagggtctcaatcctatttgtaattattgaataataaaacaattataaatgctaaatttgttttttattaacgatacaaaccaaacgcaacaagaacatttgtagtattatctataattgaaaacgcgtagttataatcgctgaggtaatatttaaaatcattttcaaatgattcacagttaatttgcgacaatataattttattttcacataaactagacgccttgtcgtcttcttcttcgtattccttctctttttcatttttctcctcataaaaattaacatagttattatcgtatccatatatgtatctatcgtatagagtaaattttttgttgtcataaatatatatgtcttttttaatggggtgtatagtaccgctgcgcatagtttttctgtaatttacaacagtgctattttctggtagttcttcggagtgtgttgctttaattattaaatttatataatcaatgaatttgggatcgtcggttttgtacaatatgttgccggcatagtacgcagcttcttctagttcaattacaccattttttagcagcaccggattaacataactttccaaaatgttgtacgaaccgttaaacaaaaacagttcacctcccttttctatactattgtctgcgagcagttgtttgttgttaaaaataacagccattgtaatgagacgcacaaactaatatcacaaactggaaatgtctatcaatatatagttgctgatatcatggagataattaaaatgataaccatctcgcaaataaataagtattttactgttttcgtaacagttttgtaataaaaaaacctataaatattccggattattcataccgtcccaccatcgggcgcggatctatgctactagtaaatcagtcacaccaaggcttcaataaggaacacacaagcaagatggtaagcgctattgttttatatgtgcttttggcggcggcggcgcattctgcctttgcggcggatcccggggataagatctgtctgggacaccacgccgtggccaatggcaccatcgtgaaaaccctgaccaacgtgcaggaggaggtcacaaacgccaccgagaccgtggagagcaccagcctgaaccggctgtgtatgaagggccggagctacaaggatctgggcaactgtcaccctatcggcatgctgattggcacacccgcctgtgatctgcacctgaccggcacatgggataccctgatcgagcggaagaatgccatcgcctactgttaccctggcaccaccatcaatgagggagccctgaggcagaaaatcatggagagcggcggcatcagcaagacaagcaccggctttgcctatggcagcagcatcaatagcgccggaaccaccaaggcctgtatgagaaacggcggcgacagcttttatgccgaggtgaagtggctggtgtccaaggacaagggccagaactttccccagaccaccaacacctacaggaacaccgatacagccgagcacctgatcatctggggcatccaccacccatctagcacccaggagaagaacgatctgtacggcacacagagcctgtctatctctgtgggcagcagcacctaccagaacaacttcgtgcctgtggtgagagccagacctcaggtgaacggccagagcggcagaatcgatttccactggaccctggtgcagcctggcgacaatatcaccttcagccacaacggaggaagaatcgcccctagcagagtgtctaaactggtgggcagaggcctgggaattcagagcgaggccagcatcgataatggctgtgagagcaagtgcttttggagaggcggctccatcaataccaagctgcccttccagaacctgagccctagaacagtgggccagtgccccaagtacgtgaacaagaaaagcctgatgctggccaccggcatgagaaatgtgccccagagagagaccagaggactgtttggagccatcgccggattcatcgagaatggatgggagggcatggtggatggctggtacggcttcagacaccagaatgcccagggaacaggacaggccgccgattacaagtctacacaggccgccatcgatcagatcaccggcaagctgaacaggctgatcgagaaaaccaacaccgagttcgagagcatcgagagcgagttcagcgagatcgagcaccagatcggcaacgtgatcaactggaccaaggacagcatcaccgacatctggacctatcaggccgaactgctggtggccatggagaatcagcacaccatcgacatggccgatagcgagatgctgaacctgtacgagagagtgaggaagcagctgagacagaacgccgaggaggatggcaagggctgcttcgagatctaccacacctgtgacgacagctgtatggagagcatccggaacaacacctacgaccacagccagtatagagaggaggccctgctgaacagactgaacatcaacagcggcagactggtgcctagaggatctcctggcagcggatatattcctgaggcccctagagatggacaggcctatgtgagaaaggatggcgaatgggtgctgctgtctacatttctgggacaccaccatcaccaccattgatgagcggccgctgcagatctgatcctttcctgggacccggcaagaaccaaaaactcactctcttcaaggaaatccgtaatgttaaacccgacacgatgaagcttgtcgttggatggaaaggaaaagagttctacagggaaacttggacccgcttcatggaagacagcttccccattgttaacgaccaagaagtgatggatgttttccttgttgtcaacatgcgtcccactagacccaaccgttgttacaaattcctggcccaacacgctctgcgttgcgaccccgactatgtacctcatgacgtgattaggatcgtcgagccttcatgggtgggcagcaacaacgagtaccgcatcagcctggctaagaagggcggcggctgcccaataatgaaccttcactctgagtacaccaactcgttcgaacagttcatcgatcgtgtcatctgggagaacttctacaagcccatcgtttacatcggtaccgactctgctgaagaggaggaaattctccttgaagtttccctggtgttcaaagtaaaggagtttgcaccagacgcacctctgttcactggtccggcgtattaaaacacgatacattgttattagtacatttattaagcgctagattctgtgcgttgttgatttacagacaattgttgtacgtattttaataattcattaaatttataatctttagggtggtatgttagagcgaaaatcaaatgattttcagcgtctttatatctgaatttaaatattaaatcctcaatagatttgtaaaataggtttcgattagtttcaaacaagggttgtttttccgaaccgatggctggactatctaatggattttcgctcaacgccacaaaacttgccaaatcttgtagcagcaatctagctttgtcgatattcgtttgtgttttgttttgtaataaaggttcgacgtcgttcaaaatattatgcgcttttgtatttctttcatcactgtcgttagtgtacaattgactcgacgtaaacacgttaaataaagcttggacatatttaacatcgggcgtgttagctttattaggccgattatcgtcgtcgtcccaaccctcgtcgttagaagttgcttccgaagacgattttgccatagccacacgacgcctattaattgtgtcggctaacacgtccgcgatcaaatttgtagttgagctttttggaattatttctgattgcgggcgtttttgggcgggtttcaatctaactgtgcccgattttaattcagacaacacgttagaaagcgatggtgcaggcggtggtaacatttcagacggcaaatctactaatggcggcggtggtggagctgatgataaatctaccatcggtggaggcgcaggcggggctggcggcggaggcggaggcggaggtggtggcggtgatgcagacggcggtttaggctcaaatgtctctttaggcaacacagtcggcacctcaactattgtactggtttcgggcgccgtttttggtttgaccggtctgagacgagtgcgatttttttcgtttctaatagcttccaacaattgttgtctgtcgtctaaaggtgcagcgggttgaggttccgtcggcattggtggagcgggcggcaattcagacatcgatggtggtggtggtggtggaggcgctggaatgttaggcacgggagaaggtggtggcggcggtgccgccggtataatttgttctggtttagtttgttcgcgcacgattgtgggcaccggcgcaggcgccgctggctgcacaacggaaggtcgtctgcttcgaggcagcgcttggggtggtggcaattcaatattataattggaatacaaatcgtaaaaatctgctataagcattgtaatttcgctatcgtttaccgtgccgatatttaacaaccgctcaatgtaagcaattgtattgtaaagagattgtctcaagctccgcacgccgataacaagccttttcatttttactacagcattgtagtggcgagacacttcgctgtcgtcgacgtacatgtatgctttgttgtcaaaaacgtcgttggcaagctttaaaatatttaaaagaacatctctgttcagcaccactgtgttgtcgtaaatgttgtttttgataatttgcgcttccgcagtatcgacacgttcaaaaaattgatgcgcatcaattttgttgttcctattattgaataaataagattgtacagattcatatctacgattcgtcatggccaccacaaatgctacgctgcaaacgctggtacaattttacgaaaactgcaaaaacgtcaaaactcggtataaaataatcaacgggcgctttggcaaaatatctattttatcgcacaagcccactagcaaattgtatttgcagaaaacaatttcggcgcacaattttaacgctgacgaaataaaagttcaccagttaatgagcgaccacccaaattttataaaaatctattttaatcacggttccatcaacaaccaagtgatcgtgatggactacattgactgtcccgatttatttgaaacactacaaattaaaggcgagctttcgtaccaacttgttagcaatattattagacagctgtgtgaagcgctcaacgatttgcacaagcacaatttcatacacaacgacataaaactcgaaaatgtcttatatttcgaagcacttgatcgcgtgtatgtttgcgattacggattgtgcaaacacgaaaactcacttagcgtgcacgacggcacgttggagtattttagtccggaaaaaattcgacacacaactatgcacgtttcgtttgactggtacgcggcgtgttaacatacaagttgctaaccggcggttcgtaatcatggtcatagctgtttcctgtgtgaaattgttatccgctcacaattccacacaacatacgagccggaagcataaagtgtaaagcctggggtgcctaatgagtgagctaactcacattaattgcgttgcgctcactgcccgctttccagtcgggaaacctgtcgtgccagctgcattaatgaatcggccaacgcgcggggagaggcggtttgcgtattgggcgctcttccgcttcctcgctcactgactcgctgcgctcggtcgttcggctgcggcgagcggtatcagctcactcaaaggcggtaatacggttatccacagaatcaggggataacgcaggaaagaacatgtgagcaaaaggccagcaaaaggccaggaaccgtaaaaaggccgcgttgctggcgtttttccataggctccgcccccctgacgagcatcacaaaaatcgacgctcaagtcagaggtggcgaaacccgacaggactataaagataccaggcgtttccccctggaagctccctcgtgcgctctcctgttccgaccctgccgcttaccggatacctgtccgcctttctcccttcgggaagcgtggcgctttctcatagctcacgctgtaggtatctcagttcggtgtaggtcgttcgctccaagctgggctgtgtgcacgaaccccccgttcagcccgaccgctgcgccttatccggtaactatcgtcttgagtccaacccggtaagacacgacttatcgccactggcagcagccactggtaacaggattagcagagcgaggtatgtaggcggtgctacagagttcttgaagtggtggcctaactacggctacactagaaggacagtatttggtatctgcgctctgctgaagccagttaccttcggaaaaagagttggtagctcttgatccggcaaacaaaccaccgctggtagcggtggtttttttgtttgcaagcagcagattacgcgcagaaaaaaaggatctcaagaagatcctttgatcttttctacggggtctgacgctcagtggaacgaaaactcacgttaagggattttggtcatgagattatcaaaaaggatcttcacctagatccttttaaattaaaaatgaagttttaaatcaatctaaagtatatatgagtaaacttggtctgacagttaccaatgcttaatcagtgaggcacctatctcagcgatctgtctatttcgttcatccatagttgcctgactccccgtcgtgtagataactacgatacgggagggcttaccatctggccccagtgctgcaatgataccgcgagacccacgctcaccggctccagatttatcagcaataaaccagccagccggaagggccgagcgcagaagtggtcctgcaactttatccgcctccatccagtctattaattgttgccgggaagctagagtaagtagttcgccagttaatagtttgcgcaacgttgttgccattgctacaggcatcgtggtgtcacgctcgtcgtttggtatggcttcattcagctccggttcccaacgatcaaggcgagttacatgatcccccatgttgtgcaaaaaagcggttagctccttcggtcctccgatcgttgtcagaagtaagttggccgcagtgttatcactcatggttatggcagcactgcataattctcttactgtcatgccatccgtaagatgcttttctgtgactggtgagtactcaaccaagtcattctgagaatagtgtatgcggcgaccgagttgctcttgcccggcgtcaatacgggataataccgcgccacatagcagaactttaaaagtgctcatcattggaaaacgttcttcggggcgaaaactctcaaggatcttaccgctgttgagatccagttcgatgtaacccactcgtgcacccaactgatcttcagcatcttttactttcaccagcgtttctgggtgagcaaaaacaggaaggcaaaatgccgcaaaaaagggaataagggcgacacggaaatgttgaatactcatactcttcctttttcaatattattgaagcatttatcagggttattgtctcatgagcggatacatatttgaatgtatttagaaaaataaacaaataggggttccgcgcacatttccccgaaaagtgccacctgacgtctaagaaaccattattatcatgacattaacctataaaaataggcgtatcacgaggccctttcgtctcgcgcgtttcggtgatgacggtgaaaacctctgacacatgcagctcccggagacggtcacagcttgtctgtaagcggatgccgggagcagacaagcccgtcagggcgcgtcagcgggtgttggcgggtgtcggggctggcttaactatgcggcatcagagcagattgtactgagagtgcaccatatgcggtgtgaaataccgcacagatgcgtaaggagaaaataccgcatcaggcgccattcgccattcaggctgcgcaactgttgggaagggcgatcggtgcgggcctcttcgctattacgccagctggcgaaagggggatgtgctgcaaggcgattaagttgggtaacgccagggttttcccagtcacgacgttgtaaaacgacggccagtgcc

SEQ ID NO: 99 - DNA, 5922 bp, Artificial Sequence
  Plasmid DNA: 56382
tcgcgcgtttcggtgatgacggtgaaaacctctgacacatgcagctcccggagacggtcacagcttgtctgtaagcggatgccgggagcagacaagcccgtcagggcgcgtcagcgggtgttggcgggtgtcggggctggcttaactatgcggcatcagagcagattgtactgagagtgcaccatatgcggtgtgaaataccgcacagatgcgtaaggagaaaataccgcatcagattggctattggccattgcatacgttgtatccatatcataatatgtacatttatattggctcatgtccaacattaccgccatgttgacattgattattgactagttattaatagtaatcaattacgggaacttccatagcccatatatggagttccgcgttacataacttacgggaatttccaaacctggctgaccgcccaacgacccccgcccattgacgtcaataatgacgtatgttcccatagtaacgccaatagggaacttccattgacgtcaatgggtggagtatttacggtaaactgcccacttgggaatttccaagtgtatcatatgccaagtacgccccctattgacgtcaatgacgggaacttccataagcttgcattatgcccagtacatgaccttatgggaatttcctacttggcagtacatctacgtattagtcatcgctattaccatggtgatgcggttttggcagtacatcaatgggcgtggatagcggtttgactcacgggaacttccaagtctccaccccattgacgtcaatgggagtttgttttgactcaccaaaatcaacgggaatttccaaaatgtcgtaacaactccgccccattgacgcaaatgggcggtaggcgtgtacggtgggaggtctatataagcagagctcgtttagtgaaccgtcagatcgcctggagacgccatccacgctgttttgacctccatagaagacaccgggaccgatccagcctccatcggctcgcatctctccttcacgcgcccgccgccctacctgaggccgccatccacgccggttgagtcgcgttctgccgcctcccgcctgtggtgcctcctgaactgcgtccgccgtctaggtaagtttaaagctcaggtcgagaccgggcctttgtccggcgctcccttggagcctacctagactcagccggctctccacgctttgcctgaccctgcttgctcaactctagttaacggtggagggcagtgtagtctgagcagtactcgttgctgccgcgcgcgccaccagacataatagctgacagactaacagactgttcctttccatgggtcttttctgcagtcaccgtcgtcgacacgtgtgatcagatatcgcggccgctctagagatatcgccaccatggcctctcagggcaccaagagaagctacgagcagatggagacaggcggcgaaagacagaatgccaccgagatcagagcctctgtgggcagaatggtgtctggcatcggcaggttctacatccagatgtgcaccgagctgaagctgtctgactacgagggcaggctgatccagaacagcatcaccatcgagaggatggtgctgtccgccttcgacgagcggagaaacagatacctggaggagcatccttctgccggaaaggaccccaagaaaaccggcggacccatctatcgcagacgggacggcaaatgggtgagggagctgatcctgtacgacaaggaagagatccggcggatttggaggcaggccaacaatggagaagatgccaccgccggactgacacacctgatgatctggcacagcaacctgaacgatgccacctaccagagaacaagggccctggtgagaactggaatggaccccaggatgtgctctctgatgcagggcagcacactgcctagaagatctggagccgctggagctgctgtgaagggagtgggcaccatggtgatggaactgatccggatgatcaagcggggcatcaacgaccggaatttctggagaggcgagaacggcagaagaaccaggatcgcctacgagcggatgtgcaacatcctgaagggcaagtttcagacagccgcccagagggctatgatggatcaggtgcgggagagcagaaatcctggcaacgccgagatcgaggacctgatcttcctggccagaagcgccctgattctgagaggaagcgtggcccacaagtcttgtctgcctgcctgtgtgtatggactggccgtggccagcggctatgattttgagcgggagggctactctctggtgggcatcgacccttttaggctgctgcagaacagccaggtgttcagcctgattaggcccaatgagaaccctgcccacaaatctcagctggtgtggatggcctgtcattctgccgccttcgaggatctgagagtgagcagcttcatcaggggcacaagagtggtgcctagaggccagctgtctacaagaggcgtgcagatcgccagcaacgagaacatggaggccatggacagcaataccctggagctgcggagcagatattgggccatcaggacaagaagcggcggcaacaccaatcagcagagagcctctgccggacagattagcgtgcagcccacattcagcgtgcagaggaacctgccttttgagagggccacaatcatggccgccttcaccggcaatacagagggcagaaccagcgacatgcggaccgagatcatcaggatgatggagagcgccagacctgaggatgtgagctttcagggcagaggcgtgttcgagctgtctgatgagaaggccaccaaccctatcgtgcccagcttcgacatgaacaacgagggcagctacttcttcggcgacaacgccgaggagtacgacaattgatgaacacgtgggatccagatctgctgtgccttctagttgccagccatctgttgtttgcccctcccccgtgccttccttgaccctggaaggtgccactcccactgtcctttcctaataaaatgaggaaattgcatcgcattgtctgagtaggtgtcattctattctggggggtggggtggggcaggacagcaagggggaggattgggaagacaatagcaggcatgctggggatgcggtgggctctatgggtacccaggtgctgaagaattgacccggttcctcctgggccagaaagaagcaggcacatccccttctctgtgacacaccctgtccacgcccctggttcttagttccagccccactcataggacactcatagctcaggagggctccgccttcaatcccacccgctaaagtacttggagcggtctctccctccctcatcagcccaccaaaccaaacctagcctccaagagtgggaagaaattaaagcaagataggctattaagtgcagagggagagaaaatgcctccaacatgtgaggaagtaatgagagaaatcatagaattttaaggccatgatttaaggccatcatggccttaatcttccgcttcctcgctcactgactcgctgcgctcggtcgttcggctgcggcgagcggtatcagctcactcaaaggcggtaatacggttatccacagaatcaggggataacgcaggaaagaacatgtgagcaaaaggccagcaaaaggccaggaaccgtaaaaaggccgcgttgctggcgtttttccataggctccgcccccctgacgagcatcacaaaaatcgacgctcaagtcagaggtggcgaaacccgacaggactataaagataccaggcgtttccccctggaagctccctcgtgcgctctcctgttccgaccctgccgcttaccggatacctgtccgcctttctcccttcgggaagcgtggcgctttctcatagctcacgctgtaggtatctcagttcggtgtaggtcgttcgctccaagctgggctgtgtgcacgaaccccccgttcagcccgaccgctgcgccttatccggtaactatcgtcttgagtccaacccggtaagacacgacttatcgccactggcagcagccactggtaacaggattagcagagcgaggtatgtaggcggtgctacagagttcttgaagtggtggcctaactacggctacactagaagaacagtatttggtatctgcgctctgctgaagccagttaccttcggaaaaagagttggtagctcttgatccggcaaacaaaccaccgctggtagcggtggtttttttgtttgcaagcagcagattacgcgcagaaaaaaaggatctcaagaagatcctttgatcttttctacggggtctgacgctcagtggaacgaaaactcacgttaagggattttggtcatgagattatcaaaaaggatcttcacctagatccttttaaattaaaaatgaagttttaaatcaatctaaagtatatatgagtaaacttggtctgacagttaccaatgcttaatcagtgaggcacctatctcagcgatctgtctatttcgttcatccatagttgcctgactcggggggggggggcgctgaggtctgcctcgtgaagaaggtgttgctgactcataccaggcctgaatcgccccatcatccagccagaaagtgagggagccacggttgatgagagctttgttgtaggtggaccagttggtgattttgaacttttgctttgccacggaacggtctgcgttgtcgggaagatgcgtgatctgatccttcaactcagcaaaagttcgatttattcaacaaagccgccgtcccgtcaagtcagcgtaatgctctgccagtgttacaaccaattaaccaattctgattagaaaaactcatcgagcatcaaatgaaactgcaatttattcatatcaggattatcaataccatatttttgaaaaagccgtttctgtaatgaaggagaaaactcaccgaggcagttccataggatggcaagatcctggtatcggtctgcgattccgactcgtccaacatcaatacaacctattaatttcccctcgtcaaaaataaggttatcaagtgagaaatcaccatgagtgacgactgaatccggtgagaatggcaaaagcttatgcatttctttccagacttgttcaacaggccagccattacgctcgtcatcaaaatcactcgcatcaaccaaaccgttattcattcgtgattgcgcctgagcgagacgaaatacgcgatcgctgttaaaaggacaattacaaacaggaatcgaatgcaaccggcgcaggaacactgccagcgcatcaacaatattttcacctgaatcaggatattcttctaatacctggaatgctgttttcccggggatcgcagtggtgagtaaccatgcatcatcaggagtacggataaaatgcttgatggtcggaagaggcataaattccgtcagccagtttagtctgaccatctcatctgtaacatcattggcaacgctacctttgccatgtttcagaaacaactctggcgcatcgggcttcccatacaatcgatagattgtcgcacctgattgcccgacattatcgcgagcccatttatacccatataaatcagcatccatgttggaatttaatcgcggcctcgagcaagacgtttcccgttgaatatggctcataacaccccttgtattactgtttatgtaagcagacagttttattgttcatgatgatatatttttatcttgtgcaatgtaacatcagagattttgagacacaacgtggctttccccccccccccattattgaagcatttatcagggttattgtctcatgagcggatacatatttgaatgtatttagaaaaataaacaaataggggttccgcgcacatttccccgaaaagtgccacctgacgtctaagaaaccattattatcatgacattaacctataaaaataggcgtatcacgaggccctttcgtc

SEQ ID NO: 100 - DNA, 11422 bp, Artificial Sequence
  Plasmid DNA: 54580
aagctttactcgtaaagcgagttgaaggatcatatttagttgcgtttatgagataagattgaaagcacgtgtaaaatgtttcccgcgcgttggcacaactatttacaatgcggccaagttataaaagattctaatctgatatgttttaaaacacctttgcggcccgagttgtttgcgtacgtgactagcgaagaagatgtgtggaccgcagaacagatagtaaaacaaaaccctagtattggagcaataatcgatttaaccaacacgtctaaatattatgatggtgtgcattttttgcgggcgggcctgttatacaaaaaaattcaagtacctggccagactttgccgcctgaaagcatagttcaagaatttattgacacggtaaaagaatttacagaaaagtgtcccggcatgttggtgggcgtgcactgcacacacggtattaatcgcaccggttacatggtgtgcagatatttaatgcacaccctgggtattgcgccgcaggaagccatagatagattcgaaaaagccagaggtcacaaaattgaaagacaaaattacgttcaagatttattaatttaattaatattatttgcattctttaacaaatactttatcctattttcaaattgttgcgcttcttccagcgaaccaaaactatgcttcgcttgctccgtttagcttgtagccgatcagtggcgttgttccaatcgacggtaggattaggccggatattctccaccacaatgttggcaacgttgatgttacgtttatgcttttggttttccacgtacgtcttttggccggtaatagccgtaaacgtagtgccgtcgcgcgtcacgcacaacaccggatgtttgcgcttgtccgcggggtattgaaccgcgcgatccgacaaatccaccactttggcaactaaatcggtgacctgcgcgtcttttttctgcattatttcgtctttcttttgcatggtttcctggaagccggtgtacatgcggtttagatcagtcatgacgcgcgtgacctgcaaatctttggcctcgatctgcttgtccttgatggcaacgatgcgttcaataaactcttgttttttaacaagttcctcggttttttgcgccaccaccgcttgcagcgcgtttgtgtgctcggtgaatgtcgcaatcagcttagtcaccaactgtttgctctcctcctcccgttgtttgatcgcgggatcgtacttgccggtgcagagcacttgaggaattacttcttctaaaagccattcttgtaattctatggcgtaaggcaatttggacttcataatcagctgaatcacgccggatttagtaatgagcactgtatgcggctgcaaatacagcgggtcgccccttttcacgacgctgttagaggtagggcccccattttggatggtctgctcaaataacgatttgtatttattgtctacatgaacacgtatagctttatcacaaactgtatattttaaactgttagcgacgtccttggccacgaaccggacctgttggtcgcgctctagcacgtaccgcaggttgaacgtatcttctccaaatttaaattctccaattttaacgcgagccattttgatacacgtgtgtcgattttgcaacaactattgttttttaacgcaaactaaacttattgtggtaagcaataattaaatatgggggaacatgcgccgctacaacactcgtcgttatgaacgcagacggcgccggtctcggcgcaagcggctaaaacgtgttgcgcgttcaacgcggcaaacatcgcaaaagccaatagtacagttttgatttgcatattaacggcgattttttaaattatcttatttaataaatagttatgacgcctacaactccccgcccgcgttgactcgctgcacctcgagcagttcgttgacgccttcctccgtgtggccgaacacgtcgagcgggtggtcgatgaccagcggcgtgccgcacgcgacgcacaagtatctgtacaccgaatgatcgtcgggcgaaggcacgtcggcctccaagtggcaatattggcaaattcgaaaatatatacagttgggttgtttgcgcatatctatcgtggcgttgggcatgtacgtccgaacgttgatttgcatgcaagccgaaattaaatcattgcgattagtgcgattaaaacgttgtacatcctcgcttttaatcatgccgtcgattaaatcgcgcaatcgagtcaagtgatcaaagtgtggaataatgttttctttgtattcccgagtcaagcgcagcgcgtattttaacaaactagccatcttgtaagttagtttcatttaatgcaactttatccaataatatattatgtatcgcacgtcaagaattaacaatgcgcccgttgtcgcatctcaacacgactatgatagagatcaaataaagcgcgaattaaatagcttgcgacgcaacgtgcacgatctgtgcacgcgttccggcacgagctttgattgtaataagtttttacgaagcgatgacatgacccccgtagtgacaacgatcacgcccaaaagaactgccgactacaaaattaccgagtatgtcggtgacgttaaaactattaagccatccaatcgaccgttagtcgaatcaggaccgctggtgcgagaagccgcgaagtatggcgaatgcatcgtataacgtgtggagtccgctcattagagcgtcatgtttagacaagaaagctacatatttaattgatcccgatgattttattgataaattgaccctaactccatacacggtattctacaatggcggggttttggtcaaaatttccggactgcgattgtacatgctgttaacggctccgcccactattaatgaaattaaaaattccaattttaaaaaacgcagcaagagaaacatttgtatgaaagaatgcgtagaaggaaagaaaaatgtcgtcgacatgctgaacaacaagattaatatgcctccgtgtataaaaaaaatattgaacgatttgaaagaaaacaatgtaccgcgcggcggtatgtacaggaagaggtttatactaaactgttacattgcaaacgtggtttcgtgtgccaagtgtgaaaaccgatgtttaatcaaggctctgacgcatttctacaaccacgactccaagtgtgtgggtgaagtcatgcatcttttaatcaaatcccaagatgtgtataaaccaccaaactgccaaaaaatgaaaactgtcgacaagctctgtccgtttgctggcaactgcaagggtctcaatcctatttgtaattattgaataataaaacaattataaatgctaaatttgttttttattaacgatacaaaccaaacgcaacaagaacatttgtagtattatctataattgaaaacgcgtagttataatcgctgaggtaatatttaaaatcattttcaaatgattcacagttaatttgcgacaatataattttattttcacataaactagacgccttgtcgtcttcttcttcgtattccttctctttttcatttttctcctcataaaaattaacatagttattatcgtatccatatatgtatctatcgtatagagtaaattttttgttgtcataaatatatatgtcttttttaatggggtgtatagtaccgctgcgcatagtttttctgtaatttacaacagtgctattttctggtagttcttcggagtgtgttgctttaattattaaatttatataatcaatgaatttgggatcgtcggttttgtacaatatgttgccggcatagtacgcagcttcttctagttcaattacaccattttttagcagcaccggattaacataactttccaaaatgttgtacgaaccgttaaacaaaaacagttcacctcccttttctatactattgtctgcgagcagttgtttgttgttaaaaataacagccattgtaatgagacgcacaaactaatatcacaaactggaaatgtctatcaatatatagttgctgatatcatggagataattaaaatgataaccatctcgcaaataaataagtattttactgttttcgtaacagttttgtaataaaaaaacctataaatattccggattattcataccgtcccaccatcgggcgcggatctatgctactagtaaatcagtcacaccaaggcttcaataaggaacacacaagcaagatggtaagcgctattgttttatatgtgcttttggcggcggcggcgcattctgcctttgcggcggatcccggggatacaatctgtattggctaccacgccaacaatagcaccgataccgtggatacagtgctggagaagaatgtgaccgtgacccactctgtgaatctgctggaggatagccacaatggcaagctgtgtaagctgaaaggaattgcccctctgcagctgggcaaatgtaatattgccggctggctgctgggaaatcctgaatgtgatctgctgctgacagccagcagctggtcttatatcgtggagaccagcaatagcgagaatggcacctgttaccctggcgacttcatcgattacgaggagctgagagaacagctgtctagcgtgtccagcttcgagaagttcgagatcttccctaagacaagcagctggcctaatcacgagacaacaaagggagtgacagccgcctgttcttatgccggagccagctccttttacagaaacctgctgtggctgacaaagaagggcagcagctaccctaagctgtctaagagctacgtgaacaacaagggcaaagaagtgctggtgctgtggggagtgcaccaccctcctacaggaacagatcagcagagcctgtaccagaatgccgatgcctatgtgtctgtgggcagcagcaagtacaacagaagattcacccctgaaattgccgccagacccaaagtgagagatcaggccggcagaatgaattactactggaccctgctggaacctggcgataccatcacatttgaggccaccggaaatctgattgccccttggtatgcctttgccctgaatagaggctctggctctggcatcattacatctgatgcccctgtgcacgactgtaataccaagtgtcagacacctcacggcgccattaatagcagcctgcccttccagaatattcaccctgtgaccatcggcgagtgtcctaagtatgtgaggagcaccaaactgagaatggccaccggcctgagaaatatccctcagagagagaccagaggactgtttggagccatcgccggctttattgagggaggatggaccggaatgatcgatggctggtacggctatcaccaccagaatgagcagggatctggatatgccgccgatcagaagtctacacagaacgccatcgacggcatcacaaacaaggtgaacagcgtgatcgagaagatgaacacccagtttacagctgtgggcaaggagttcaacaacctggagcggagaatcgagaacctgaacaagaaagtggacgacggcttcctggatatttggacctacaatgccgagctgctcgtgctcctggagaatgagagaaccctggacttccacgacagcaatgtgagaaacctgtacgagaaggtgaagagccagctgaagaacaatgccaaggagatcggcaacggctgctttgagttctaccacaagtgtgacgatgcctgtatggagtctgtgagaaacggcacctacgactaccctaagtatagcgaggagagcaagctgaatagagaggagatcgacggcgtgaaactggaaagcatgggcgtgtatcagatcagaagcctggtgcctagaggatctcctggcagcggatatattcctgaggcccctagagatggacaggcctatgtgagaaaggatggcgaatgggtgctgctgtctacatttctgggacaccaccatcaccaccattgatgagcggccgctgcagatctgatcctttcctgggacccggcaagaaccaaaaactcactctcttcaaggaaatccgtaatgttaaacccgacacgatgaagcttgtcgttggatggaaaggaaaagagttctacagggaaacttggacccgcttcatggaagacagcttccccattgttaacgaccaagaagtgatggatgttttccttgttgtcaacatgcgtcccactagacccaaccgttgttacaaattcctggcccaacacgctctgcgttgcgaccccgactatgtacctcatgacgtgattaggatcgtcgagccttcatgggtgggcagcaacaacgagtaccgcatcagcctggctaagaagggcggcggctgcccaataatgaaccttcactctgagtacaccaactcgttcgaacagttcatcgatcgtgtcatctgggagaacttctacaagcccatcgtttacatcggtaccgactctgctgaagaggaggaaattctccttgaagtttccctggtgttcaaagtaaaggagtttgcaccagacgcacctctgttcactggtccggcgtattaaaacacgatacattgttattagtacatttattaagcgctagattctgtgcgttgttgatttacagacaattgttgtacgtattttaataattcattaaatttataatctttagggtggtatgttagagcgaaaatcaaatgattttcagcgtctttatatctgaatttaaatattaaatcctcaatagatttgtaaaataggtttcgattagtttcaaacaagggttgtttttccgaaccgatggctggactatctaatggattttcgctcaacgccacaaaacttgccaaatcttgtagcagcaatctagctttgtcgatattcgtttgtgttttgttttgtaataaaggttcgacgtcgttcaaaatattatgcgcttttgtatttctttcatcactgtcgttagtgtacaattgactcgacgtaaacacgttaaataaagcttggacatatttaacatcgggcgtgttagctttattaggccgattatcgtcgtcgtcccaaccctcgtcgttagaagttgcttccgaagacgattttgccatagccacacgacgcctattaattgtgtcggctaacacgtccgcgatcaaatttgtagttgagctttttggaattatttctgattgcgggcgtttttgggcgggtttcaatctaactgtgcccgattttaattcagacaacacgttagaaagcgatggtgcaggcggtggtaacatttcagacggcaaatctactaatggcggcggtggtggagctgatgataaatctaccatcggtggaggcgcaggcggggctggcggcggaggcggaggcggaggtggtggcggtgatgcagacggcggtttaggctcaaatgtctctttaggcaacacagtcggcacctcaactattgtactggtttcgggcgccgtttttggtttgaccggtctgagacgagtgcgatttttttcgtttctaatagcttccaacaattgttgtctgtcgtctaaaggtgcagcgggttgaggttccgtcggcattggtggagcgggcggcaattcagacatcgatggtggtggtggtggtggaggcgctggaatgttaggcacgggagaaggtggtggcggcggtgccgccggtataatttgttctggtttagtttgttcgcgcacgattgtgggcaccggcgcaggcgccgctggctgcacaacggaaggtcgtctgcttcgaggcagcgcttggggtggtggcaattcaatattataattggaatacaaatcgtaaaaatctgctataagcattgtaatttcgctatcgtttaccgtgccgatatttaacaaccgctcaatgtaagcaattgtattgtaaagagattgtctcaagctccgcacgccgataacaagccttttcatttttactacagcattgtagtggcgagacacttcgctgtcgtcgacgtacatgtatgctttgttgtcaaaaacgtcgttggcaagctttaaaatatttaaaagaacatctctgttcagcaccactgtgttgtcgtaaatgttgtttttgataatttgcgcttccgcagtatcgacacgttcaaaaaattgatgcgcatcaattttgttgttcctattattgaataaataagattgtacagattcatatctacgattcgtcatggccaccacaaatgctacgctgcaaacgctggtacaattttacgaaaactgcaaaaacgtcaaaactcggtataaaataatcaacgggcgctttggcaaaatatctattttatcgcacaagcccactagcaaattgtatttgcagaaaacaatttcggcgcacaattttaacgctgacgaaataaaagttcaccagttaatgagcgaccacccaaattttataaaaatctattttaatcacggttccatcaacaaccaagtgatcgtgatggactacattgactgtcccgatttatttgaaacactacaaattaaaggcgagctttcgtaccaacttgttagcaatattattagacagctgtgtgaagcgctcaacgatttgcacaagcacaatttcatacacaacgacataaaactcgaaaatgtcttatatttcgaagcacttgatcgcgtgtatgtttgcgattacggattgtgcaaacacgaaaactcacttagcgtgcacgacggcacgttggagtattttagtccggaaaaaattcgacacacaactatgcacgtttcgtttgactggtacgcggcgtgttaacatacaagttgctaaccggcggttcgtaatcatggtcatagctgtttcctgtgtgaaattgttatccgctcacaattccacacaacatacgagccggaagcataaagtgtaaagcctggggtgcctaatgagtgagctaactcacattaattgcgttgcgctcactgcccgctttccagtcgggaaacctgtcgtgccagctgcattaatgaatcggccaacgcgcggggagaggcggtttgcgtattgggcgctcttccgcttcctcgctcactgactcgctgcgctcggtcgttcggctgcggcgagcggtatcagctcactcaaaggcggtaatacggttatccacagaatcaggggataacgcaggaaagaacatgtgagcaaaaggccagcaaaaggccaggaaccgtaaaaaggccgcgttgctggcgtttttccataggctccgcccccctgacgagcatcacaaaaatcgacgctcaagtcagaggtggcgaaacccgacaggactataaagataccaggcgtttccccctggaagctccctcgtgcgctctcctgttccgaccctgccgcttaccggatacctgtccgcctttctcccttcgggaagcgtggcgctttctcatagctcacgctgtaggtatctcagttcggtgtaggtcgttcgctccaagctgggctgtgtgcacgaaccccccgttcagcccgaccgctgcgccttatccggtaactatcgtcttgagtccaacccggtaagacacgacttatcgccactggcagcagccactggtaacaggattagcagagcgaggtatgtaggcggtgctacagagttcttgaagtggtggcctaactacggctacactagaaggacagtatttggtatctgcgctctgctgaagccagttaccttcggaaaaagagttggtagctcttgatccggcaaacaaaccaccgctggtagcggtggtttttttgtttgcaagcagcagattacgcgcagaaaaaaaggatctcaagaagatcctttgatcttttctacggggtctgacgctcagtggaacgaaaactcacgttaagggattttggtcatgagattatcaaaaaggatcttcacctagatccttttaaattaaaaatgaagttttaaatcaatctaaagtatatatgagtaaacttggtctgacagttaccaatgcttaatcagtgaggcacctatctcagcgatctgtctatttcgttcatccatagttgcctgactccccgtcgtgtagataactacgatacgggagggcttaccatctggccccagtgctgcaatgataccgcgagacccacgctcaccggctccagatttatcagcaataaaccagccagccggaagggccgagcgcagaagtggtcctgcaactttatccgcctccatccagtctattaattgttgccgggaagctagagtaagtagttcgccagttaatagtttgcgcaacgttgttgccattgctacaggcatcgtggtgtcacgctcgtcgtttggtatggcttcattcagctccggttcccaacgatcaaggcgagttacatgatcccccatgttgtgcaaaaaagcggttagctccttcggtcctccgatcgttgtcagaagtaagttggccgcagtgttatcactcatggttatggcagcactgcataattctcttactgtcatgccatccgtaagatgcttttctgtgactggtgagtactcaaccaagtcattctgagaatagtgtatgcggcgaccgagttgctcttgcccggcgtcaatacgggataataccgcgccacatagcagaactttaaaagtgctcatcattggaaaacgttcttcggggcgaaaactctcaaggatcttaccgctgttgagatccagttcgatgtaacccactcgtgcacccaactgatcttcagcatcttttactttcaccagcgtttctgggtgagcaaaaacaggaaggcaaaatgccgcaaaaaagggaataagggcgacacggaaatgttgaatactcatactcttcctttttcaatattattgaagcatttatcagggttattgtctcatgagcggatacatatttgaatgtatttagaaaaataaacaaataggggttccgcgcacatttccccgaaaagtgccacctgacgtctaagaaaccattattatcatgacattaacctataaaaataggcgtatcacgaggccctttcgtctcgcgcgtttcggtgatgacggtgaaaacctctgacacatgcagctcccggagacggtcacagcttgtctgtaagcggatgccgggagcagacaagcccgtcagggcgcgtcagcgggtgttggcgggtgtcggggctggcttaactatgcggcatcagagcagattgtactgagagtgcaccatatgcggtgtgaaataccgcacagatgcgtaaggagaaaataccgcatcaggcgccattcgccattcaggctgcgcaactgttgggaagggcgatcggtgcgggcctcttcgctattacgccagctggcgaaagggggatgtgctgcaaggcgattaagttgggtaacgccagggttttcccagtcacgacgttgtaaaacgacggccagtgcc

SEQ ID NO: 101 - DNA, 11383 bp, Artificial Sequence
  Plasmid DNA: 54581
aagctttactcgtaaagcgagttgaaggatcatatttagttgcgtttatgagataagattgaaagcacgtgtaaaatgtttcccgcgcgttggcacaactatttacaatgcggccaagttataaaagattctaatctgatatgttttaaaacacctttgcggcccgagttgtttgcgtacgtgactagcgaagaagatgtgtggaccgcagaacagatagtaaaacaaaaccctagtattggagcaataatcgatttaaccaacacgtctaaatattatgatggtgtgcattttttgcgggcgggcctgttatacaaaaaaattcaagtacctggccagactttgccgcctgaaagcatagttcaagaatttattgacacggtaaaagaatttacagaaaagtgtcccggcatgttggtgggcgtgcactgcacacacggtattaatcgcaccggttacatggtgtgcagatatttaatgcacaccctgggtattgcgccgcaggaagccatagatagattcgaaaaagccagaggtcacaaaattgaaagacaaaattacgttcaagatttattaatttaattaatattatttgcattctttaacaaatactttatcctattttcaaattgttgcgcttcttccagcgaaccaaaactatgcttcgcttgctccgtttagcttgtagccgatcagtggcgttgttccaatcgacggtaggattaggccggatattctccaccacaatgttggcaacgttgatgttacgtttatgcttttggttttccacgtacgtcttttggccggtaatagccgtaaacgtagtgccgtcgcgcgtcacgcacaacaccggatgtttgcgcttgtccgcggggtattgaaccgcgcgatccgacaaatccaccactttggcaactaaatcggtgacctgcgcgtcttttttctgcattatttcgtctttcttttgcatggtttcctggaagccggtgtacatgcggtttagatcagtcatgacgcgcgtgacctgcaaatctttggcctcgatctgcttgtccttgatggcaacgatgcgttcaataaactcttgttttttaacaagttcctcggttttttgcgccaccaccgcttgcagcgcgtttgtgtgctcggtgaatgtcgcaatcagcttagtcaccaactgtttgctctcctcctcccgttgtttgatcgcgggatcgtacttgccggtgcagagcacttgaggaattacttcttctaaaagccattcttgtaattctatggcgtaaggcaatttggacttcataatcagctgaatcacgccggatttagtaatgagcactgtatgcggctgcaaatacagcgggtcgccccttttcacgacgctgttagaggtagggcccccattttggatggtctgctcaaataacgatttgtatttattgtctacatgaacacgtatagctttatcacaaactgtatattttaaactgttagcgacgtccttggccacgaaccggacctgttggtcgcgctctagcacgtaccgcaggttgaacgtatcttctccaaatttaaattctccaattttaacgcgagccattttgatacacgtgtgtcgattttgcaacaactattgttttttaacgcaaactaaacttattgtggtaagcaataattaaatatgggggaacatgcgccgctacaacactcgtcgttatgaacgcagacggcgccggtctcggcgcaagcggctaaaacgtgttgcgcgttcaacgcggcaaacatcgcaaaagccaatagtacagttttgatttgcatattaacggcgattttttaaattatcttatttaataaatagttatgacgcctacaactccccgcccgcgttgactcgctgcacctcgagcagttcgttgacgccttcctccgtgtggccgaacacgtcgagcgggtggtcgatgaccagcggcgtgccgcacgcgacgcacaagtatctgtacaccgaatgatcgtcgggcgaaggcacgtcggcctccaagtggcaatattggcaaattcgaaaatatatacagttgggttgtttgcgcatatctatcgtggcgttgggcatgtacgtccgaacgttgatttgcatgcaagccgaaattaaatcattgcgattagtgcgattaaaacgttgtacatcctcgcttttaatcatgccgtcgattaaatcgcgcaatcgagtcaagtgatcaaagtgtggaataatgttttctttgtattcccgagtcaagcgcagcgcgtattttaacaaactagccatcttgtaagttagtttcatttaatgcaactttatccaataatatattatgtatcgcacgtcaagaattaacaatgcgcccgttgtcgcatctcaacacgactatgatagagatcaaataaagcgcgaattaaatagcttgcgacgcaacgtgcacgatctgtgcacgcgttccggcacgagctttgattgtaataagtttttacgaagcgatgacatgacccccgtagtgacaacgatcacgcccaaaagaactgccgactacaaaattaccgagtatgtcggtgacgttaaaactattaagccatccaatcgaccgttagtcgaatcaggaccgctggtgcgagaagccgcgaagtatggcgaatgcatcgtataacgtgtggagtccgctcattagagcgtcatgtttagacaagaaagctacatatttaattgatcccgatgattttattgataaattgaccctaactccatacacggtattctacaatggcggggttttggtcaaaatttccggactgcgattgtacatgctgttaacggctccgcccactattaatgaaattaaaaattccaattttaaaaaacgcagcaagagaaacatttgtatgaaagaatgcgtagaaggaaagaaaaatgtcgtcgacatgctgaacaacaagattaatatgcctccgtgtataaaaaaaatattgaacgatttgaaagaaaacaatgtaccgcgcggcggtatgtacaggaagaggtttatactaaactgttacattgcaaacgtggtttcgtgtgccaagtgtgaaaaccgatgtttaatcaaggctctgacgcatttctacaaccacgactccaagtgtgtgggtgaagtcatgcatcttttaatcaaatcccaagatgtgtataaaccaccaaactgccaaaaaatgaaaactgtcgacaagctctgtccgtttgctggcaactgcaagggtctcaatcctatttgtaattattgaataataaaacaattataaatgctaaatttgttttttattaacgatacaaaccaaacgcaacaagaacatttgtagtattatctataattgaaaacgcgtagttataatcgctgaggtaatatttaaaatcattttcaaatgattcacagttaatttgcgacaatataattttattttcacataaactagacgccttgtcgtcttcttcttcgtattccttctctttttcatttttctcctcataaaaattaacatagttattatcgtatccatatatgtatctatcgtatagagtaaattttttgttgtcataaatatatatgtcttttttaatggggtgtatagtaccgctgcgcatagtttttctgtaatttacaacagtgctattttctggtagttcttcggagtgtgttgctttaattattaaatttatataatcaatgaatttgggatcgtcggttttgtacaatatgttgccggcatagtacgcagcttcttctagttcaattacaccattttttagcagcaccggattaacataactttccaaaatgttgtacgaaccgttaaacaaaaacagttcacctcccttttctatactattgtctgcgagcagttgtttgttgttaaaaataacagccattgtaatgagacgcacaaactaatatcacaaactggaaatgtctatcaatatatagttgctgatatcatggagataattaaaatgataaccatctcgcaaataaataagtattttactgttttcgtaacagttttgtaataaaaaaacctataaatattccggattattcataccgtcccaccatcgggcgcggatctatgctactagtaaatcagtcacaccaaggcttcaataaggaacacacaagcaagatggtaagcgctattgttttatatgtgcttttggcggcggcggcgcattctgcctttgcggcggatcccggggatacaatctgtattggctaccacgccaacaatagcaccgataccgtggatacagtgctggagaagaatgtgaccgtgacccactctgtgaatctgctggaggatagccacaatggcaagctgtgtaagctgaaaggaattgcccctctgcagctgggcaaatgtaatattgccggctggctgctgggaaatcctgaatgtgatctgctgctgacagccagcagctggtcttatatcgtggagaccagcaatagcgagaatggcacctgttaccctggcgacttcatcgattacgaggagctgagagaacagctgtctagcgtgtccagcttcgagaagttcgagatcttccctaagacaagcagctggcctaatcacgagacaacaaagggagtgacagccgcctgttcttatgccggagccagctccttttacagaaacctgctgtggctgacaaagaagggcagcagctaccctaagctgtctaagagctacgtgaacaacaagggcaaagaagtgctggtgctgtggggagtgcaccaccctcctacaggaacagatcagcagagcctgtaccagaatgccgatgcctatgtgtctgtgggcagcagcaagtacaacagaagattcacccctgaaattgccgccagacccaaagtgagagatcaggccggcagaatgaattactactggaccctgctggaacctggcgataccatcacatttgaggccaccggaaatctgattgccccttggtatgcctttgccctgaatagaggctctggctctggcatcattacatctgatgcccctgtgcacgactgtaataccaagtgtcagacacctcacggcgccattaatagcagcctgcccttccagaatattcaccctgtgaccatcggcgagtgtcctaagtatgtgaggagcaccaaactgagaatggccaccggcctgagaaatatccctcagagagagaccagaggactgtttggagccatcgccggctttattgagggaggatggaccggaatgatcgatggctggtacggctatcaccaccagaatgagcagggatctggatatgccgccgatcagaagtctacacagaacgccatcgacggcatcacaaacaaggtgaacagcgtgatcgagaagatgaacacccagtttacagctgtgggcaaggagttcaacaacctggagcggagaatcgagaacctgaacaagaaagtggacgacggcttcctggatatttggacctacaatgccgagctgctcgtgctcctggagaatgagagaaccctggacttccacgacagcaatgtgagaaacctgtacgagaaggtgaagagccagctgaagaacaatgccaaggagatcggcaacggctgctttgagttctaccacaagtgtgacgatgcctgtatggagtctgtgagaaacggcacctacgactaccctaagtatagcgaggagagcaagctgaatagagaggagatcagaagcctggtgcctagaggatctcctggcagcggatatattcctgaggcccctagagatggacaggcctatgtgagaaaggatggcgaatgggtgctgctgtctacatttctgggacaccaccatcaccaccattgatgagcggccgctgcagatctgatcctttcctgggacccggcaagaaccaaaaactcactctcttcaaggaaatccgtaatgttaaacccgacacgatgaagcttgtcgttggatggaaaggaaaagagttctacagggaaacttggacccgcttcatggaagacagcttccccattgttaacgaccaagaagtgatggatgttttccttgttgtcaacatgcgtcccactagacccaaccgttgttacaaattcctggcccaacacgctctgcgttgcgaccccgactatgtacctcatgacgtgattaggatcgtcgagccttcatgggtgggcagcaacaacgagtaccgcatcagcctggctaagaagggcggcggctgcccaataatgaaccttcactctgagtacaccaactcgttcgaacagttcatcgatcgtgtcatctgggagaacttctacaagcccatcgtttacatcggtaccgactctgctgaagaggaggaaattctccttgaagtttccctggtgttcaaagtaaaggagtttgcaccagacgcacctctgttcactggtccggcgtattaaaacacgatacattgttattagtacatttattaagcgctagattctgtgcgttgttgatttacagacaattgttgtacgtattttaataattcattaaatttataatctttagggtggtatgttagagcgaaaatcaaatgattttcagcgtctttatatctgaatttaaatattaaatcctcaatagatttgtaaaataggtttcgattagtttcaaacaagggttgtttttccgaaccgatggctggactatctaatggattttcgctcaacgccacaaaacttgccaaatcttgtagcagcaatctagctttgtcgatattcgtttgtgttttgttttgtaataaaggttcgacgtcgttcaaaatattatgcgcttttgtatttctttcatcactgtcgttagtgtacaattgactcgacgtaaacacgttaaataaagcttggacatatttaacatcgggcgtgttagctttattaggccgattatcgtcgtcgtcccaaccctcgtcgttagaagttgcttccgaagacgattttgccatagccacacgacgcctattaattgtgtcggctaacacgtccgcgatcaaatttgtagttgagctttttggaattatttctgattgcgggcgtttttgggcgggtttcaatctaactgtgcccgattttaattcagacaacacgttagaaagcgatggtgcaggcggtggtaacatttcagacggcaaatctactaatggcggcggtggtggagctgatgataaatctaccatcggtggaggcgcaggcggggctggcggcggaggcggaggcggaggtggtggcggtgatgcagacggcggtttaggctcaaatgtctctttaggcaacacagtcggcacctcaactattgtactggtttcgggcgccgtttttggtttgaccggtctgagacgagtgcgatttttttcgtttctaatagcttccaacaattgttgtctgtcgtctaaaggtgcagcgggttgaggttccgtcggcattggtggagcgggcggcaattcagacatcgatggtggtggtggtggtggaggcgctggaatgttaggcacgggagaaggtggtggcggcggtgccgccggtataatttgttctggtttagtttgttcgcgcacgattgtgggcaccggcgcaggcgccgctggctgcacaacggaaggtcgtctgcttcgaggcagcgcttggggtggtggcaattcaatattataattggaatacaaatcgtaaaaatctgctataagcattgtaatttcgctatcgtttaccgtgccgatatttaacaaccgctcaatgtaagcaattgtattgtaaagagattgtctcaagctccgcacgccgataacaagccttttcatttttactacagcattgtagtggcgagacacttcgctgtcgtcgacgtacatgtatgctttgttgtcaaaaacgtcgttggcaagctttaaaatatttaaaagaacatctctgttcagcaccactgtgttgtcgtaaatgttgtttttgataatttgcgcttccgcagtatcgacacgttcaaaaaattgatgcgcatcaattttgttgttcctattattgaataaataagattgtacagattcatatctacgattcgtcatggccaccacaaatgctacgctgcaaacgctggtacaattttacgaaaactgcaaaaacgtcaaaactcggtataaaataatcaacgggcgctttggcaaaatatctattttatcgcacaagcccactagcaaattgtatttgcagaaaacaatttcggcgcacaattttaacgctgacgaaataaaagttcaccagttaatgagcgaccacccaaattttataaaaatctattttaatcacggttccatcaacaaccaagtgatcgtgatggactacattgactgtcccgatttatttgaaacactacaaattaaaggcgagctttcgtaccaacttgttagcaatattattagacagctgtgtgaagcgctcaacgatttgcacaagcacaatttcatacacaacgacataaaactcgaaaatgtcttatatttcgaagcacttgatcgcgtgtatgtttgcgattacggattgtgcaaacacgaaaactcacttagcgtgcacgacggcacgttggagtattttagtccggaaaaaattcgacacacaactatgcacgtttcgtttgactggtacgcggcgtgttaacatacaagttgctaaccggcggttcgtaatcatggtcatagctgtttcctgtgtgaaattgttatccgctcacaattccacacaacatacgagccggaagcataaagtgtaaagcctggggtgcctaatgagtgagctaactcacattaattgcgttgcgctcactgcccgctttccagtcgggaaacctgtcgtgccagctgcattaatgaatcggccaacgcgcggggagaggcggtttgcgtattgggcgctcttccgcttcctcgctcactgactcgctgcgctcggtcgttcggctgcggcgagcggtatcagctcactcaaaggcggtaatacggttatccacagaatcaggggataacgcaggaaagaacatgtgagcaaaaggccagcaaaaggccaggaaccgtaaaaaggccgcgttgctggcgtttttccataggctccgcccccctgacgagcatcacaaaaatcgacgctcaagtcagaggtggcgaaacccgacaggactataaagataccaggcgtttccccctggaagctccctcgtgcgctctcctgttccgaccctgccgcttaccggatacctgtccgcctttctcccttcgggaagcgtggcgctttctcatagctcacgctgtaggtatctcagttcggtgtaggtcgttcgctccaagctgggctgtgtgcacgaaccccccgttcagcccgaccgctgcgccttatccggtaactatcgtcttgagtccaacccggtaagacacgacttatcgccactggcagcagccactggtaacaggattagcagagcgaggtatgtaggcggtgctacagagttcttgaagtggtggcctaactacggctacactagaaggacagtatttggtatctgcgctctgctgaagccagttaccttcggaaaaagagttggtagctcttgatccggcaaacaaaccaccgctggtagcggtggtttttttgtttgcaagcagcagattacgcgcagaaaaaaaggatctcaagaagatcctttgatcttttctacggggtctgacgctcagtggaacgaaaactcacgttaagggattttggtcatgagattatcaaaaaggatcttcacctagatccttttaaattaaaaatgaagttttaaatcaatctaaagtatatatgagtaaacttggtctgacagttaccaatgcttaatcagtgaggcacctatctcagcgatctgtctatttcgttcatccatagttgcctgactccccgtcgtgtagataactacgatacgggagggcttaccatctggccccagtgctgcaatgataccgcgagacccacgctcaccggctccagatttatcagcaataaaccagccagccggaagggccgagcgcagaagtggtcctgcaactttatccgcctccatccagtctattaattgttgccgggaagctagagtaagtagttcgccagttaatagtttgcgcaacgttgttgccattgctacaggcatcgtggtgtcacgctcgtcgtttggtatggcttcattcagctccggttcccaacgatcaaggcgagttacatgatcccccatgttgtgcaaaaaagcggttagctccttcggtcctccgatcgttgtcagaagtaagttggccgcagtgttatcactcatggttatggcagcactgcataattctcttactgtcatgccatccgtaagatgcttttctgtgactggtgagtactcaaccaagtcattctgagaatagtgtatgcggcgaccgagttgctcttgcccggcgtcaatacgggataataccgcgccacatagcagaactttaaaagtgctcatcattggaaaacgttcttcggggcgaaaactctcaaggatcttaccgctgttgagatccagttcgatgtaacccactcgtgcacccaactgatcttcagcatcttttactttcaccagcgtttctgggtgagcaaaaacaggaaggcaaaatgccgcaaaaaagggaataagggcgacacggaaatgttgaatactcatactcttcctttttcaatattattgaagcatttatcagggttattgtctcatgagcggatacatatttgaatgtatttagaaaaataaacaaataggggttccgcgcacatttccccgaaaagtgccacctgacgtctaagaaaccattattatcatgacattaacctataaaaataggcgtatcacgaggccctttcgtctcgcgcgtttcggtgatgacggtgaaaacctctgacacatgcagctcccggagacggtcacagcttgtctgtaagcggatgccgggagcagacaagcccgtcagggcgcgtcagcgggtgttggcgggtgtcggggctggcttaactatgcggcatcagagcagattgtactgagagtgcaccatatgcggtgtgaaataccgcacagatgcgtaaggagaaaataccgcatcaggcgccattcgccattcaggctgcgcaactgttgggaagggcgatcggtgcgggcctcttcgctattacgccagctggcgaaagggggatgtgctgcaaggcgattaagttgggtaacgccagggttttcccagtcacgacgttgtaaaacgacggccagtgcc

SEQ ID NO: 102 - DNA, 11452 bp, Artificial Sequence
  Plasmid DNA: 54582
aagctttactcgtaaagcgagttgaaggatcatatttagttgcgtttatgagataagattgaaagcacgtgtaaaatgtttcccgcgcgttggcacaactatttacaatgcggccaagttataaaagattctaatctgatatgttttaaaacacctttgcggcccgagttgtttgcgtacgtgactagcgaagaagatgtgtggaccgcagaacagatagtaaaacaaaaccctagtattggagcaataatcgatttaaccaacacgtctaaatattatgatggtgtgcattttttgcgggcgggcctgttatacaaaaaaattcaagtacctggccagactttgccgcctgaaagcatagttcaagaatttattgacacggtaaaagaatttacagaaaagtgtcccggcatgttggtgggcgtgcactgcacacacggtattaatcgcaccggttacatggtgtgcagatatttaatgcacaccctgggtattgcgccgcaggaagccatagatagattcgaaaaagccagaggtcacaaaattgaaagacaaaattacgttcaagatttattaatttaattaatattatttgcattctttaacaaatactttatcctattttcaaattgttgcgcttcttccagcgaaccaaaactatgcttcgcttgctccgtttagcttgtagccgatcagtggcgttgttccaatcgacggtaggattaggccggatattctccaccacaatgttggcaacgttgatgttacgtttatgcttttggttttccacgtacgtcttttggccggtaatagccgtaaacgtagtgccgtcgcgcgtcacgcacaacaccggatgtttgcgcttgtccgcggggtattgaaccgcgcgatccgacaaatccaccactttggcaactaaatcggtgacctgcgcgtcttttttctgcattatttcgtctttcttttgcatggtttcctggaagccggtgtacatgcggtttagatcagtcatgacgcgcgtgacctgcaaatctttggcctcgatctgcttgtccttgatggcaacgatgcgttcaataaactcttgttttttaacaagttcctcggttttttgcgccaccaccgcttgcagcgcgtttgtgtgctcggtgaatgtcgcaatcagcttagtcaccaactgtttgctctcctcctcccgttgtttgatcgcgggatcgtacttgccggtgcagagcacttgaggaattacttcttctaaaagccattcttgtaattctatggcgtaaggcaatttggacttcataatcagctgaatcacgccggatttagtaatgagcactgtatgcggctgcaaatacagcgggtcgccccttttcacgacgctgttagaggtagggcccccattttggatggtctgctcaaataacgatttgtatttattgtctacatgaacacgtatagctttatcacaaactgtatattttaaactgttagcgacgtccttggccacgaaccggacctgttggtcgcgctctagcacgtaccgcaggttgaacgtatcttctccaaatttaaattctccaattttaacgcgagccattttgatacacgtgtgtcgattttgcaacaactattgttttttaacgcaaactaaacttattgtggtaagcaataattaaatatgggggaacatgcgccgctacaacactcgtcgttatgaacgcagacggcgccggtctcggcgcaagcggctaaaacgtgttgcgcgttcaacgcggcaaacatcgcaaaagccaatagtacagttttgatttgcatattaacggcgattttttaaattatcttatttaataaatagttatgacgcctacaactccccgcccgcgttgactcgctgcacctcgagcagttcgttgacgccttcctccgtgtggccgaacacgtcgagcgggtggtcgatgaccagcggcgtgccgcacgcgacgcacaagtatctgtacaccgaatgatcgtcgggcgaaggcacgtcggcctccaagtggcaatattggcaaattcgaaaatatatacagttgggttgtttgcgcatatctatcgtggcgttgggcatgtacgtccgaacgttgatttgcatgcaagccgaaattaaatcattgcgattagtgcgattaaaacgttgtacatcctcgcttttaatcatgccgtcgattaaatcgcgcaatcgagtcaagtgatcaaagtgtggaataatgttttctttgtattcccgagtcaagcgcagcgcgtattttaacaaactagccatcttgtaagttagtttcatttaatgcaactttatccaataatatattatgtatcgcacgtcaagaattaacaatgcgcccgttgtcgcatctcaacacgactatgatagagatcaaataaagcgcgaattaaatagcttgcgacgcaacgtgcacgatctgtgcacgcgttccggcacgagctttgattgtaataagtttttacgaagcgatgacatgacccccgtagtgacaacgatcacgcccaaaagaactgccgactacaaaattaccgagtatgtcggtgacgttaaaactattaagccatccaatcgaccgttagtcgaatcaggaccgctggtgcgagaagccgcgaagtatggcgaatgcatcgtataacgtgtggagtccgctcattagagcgtcatgtttagacaagaaagctacatatttaattgatcccgatgattttattgataaattgaccctaactccatacacggtattctacaatggcggggttttggtcaaaatttccggactgcgattgtacatgctgttaacggctccgcccactattaatgaaattaaaaattccaattttaaaaaacgcagcaagagaaacatttgtatgaaagaatgcgtagaaggaaagaaaaatgtcgtcgacatgctgaacaacaagattaatatgcctccgtgtataaaaaaaatattgaacgatttgaaagaaaacaatgtaccgcgcggcggtatgtacaggaagaggtttatactaaactgttacattgcaaacgtggtttcgtgtgccaagtgtgaaaaccgatgtttaatcaaggctctgacgcatttctacaaccacgactccaagtgtgtgggtgaagtcatgcatcttttaatcaaatcccaagatgtgtataaaccaccaaactgccaaaaaatgaaaactgtcgacaagctctgtccgtttgctggcaactgcaagggtctcaatcctatttgtaattattgaataataaaacaattataaatgctaaatttgttttttattaacgatacaaaccaaacgcaacaagaacatttgtagtattatctataattgaaaacgcgtagttataatcgctgaggtaatatttaaaatcattttcaaatgattcacagttaatttgcgacaatataattttattttcacataaactagacgccttgtcgtcttcttcttcgtattccttctctttttcatttttctcctcataaaaattaacatagttattatcgtatccatatatgtatctatcgtatagagtaaattttttgttgtcataaatatatatgtcttttttaatggggtgtatagtaccgctgcgcatagtttttctgtaatttacaacagtgctattttctggtagttcttcggagtgtgttgctttaattattaaatttatataatcaatgaatttgggatcgtcggttttgtacaatatgttgccggcatagtacgcagcttcttctagttcaattacaccattttttagcagcaccggattaacataactttccaaaatgttgtacgaaccgttaaacaaaaacagttcacctcccttttctatactattgtctgcgagcagttgtttgttgttaaaaataacagccattgtaatgagacgcacaaactaatatcacaaactggaaatgtctatcaatatatagttgctgatatcatggagataattaaaatgataaccatctcgcaaataaataagtattttactgttttcgtaacagttttgtaataaaaaaacctataaatattccggattattcataccgtcccaccatcgggcgcggatctatgctactagtaaatcagtcacaccaaggcttcaataaggaacacacaagcaagatggtaagcgctattgttttatatgtgcttttggcggcggcggcgcattctgcctttgcggcggatcccggggatacaatctgtattggctaccacgccaacaatagcaccgataccgtggatacagtgctggagaagaatgtgaccgtgacccactctgtgaatctgctggaggatagccacaatggcaagctgtgtaagctgaaaggaattgcccctctgcagctgggcaaatgtaatattgccggctggctgctgggaaatcctgaatgtgatctgctgctgacagccagcagctggtcttatatcgtggagaccagcaatagcgagaatggcacctgttaccctggcgacttcatcgattacgaggagctgagagaacagctgtctagcgtgtccagcttcgagaagttcgagatcttccctaagacaagcagctggcctaatcacgagacaacaaagggagtgacagccgcctgttcttatgccggagccagctccttttacagaaacctgctgtggctgacaaagaagggcagcagctaccctaagctgtctaagagctacgtgaacaacaagggcaaagaagtgctggtgctgtggggagtgcaccaccctcctacaggaacagatcagcagagcctgtaccagaatgccgatgcctatgtgtctgtgggcagcagcaagtacaacagaagattcacccctgaaattgccgccagacccaaagtgagagatcaggccggcagaatgaattactactggaccctgctggaacctggcgataccatcacatttgaggccaccggaaatctgattgccccttggtatgcctttgccctgaatagaggctctggctctggcatcattacatctgatgcccctgtgcacgactgtaataccaagtgtcagacacctcacggcgccattaatagcagcctgcccttccagaatattcaccctgtgaccatcggcgagtgtcctaagtatgtgaggagcaccaaactgagaatggccaccggcctgagaaatatccctcagagagagaccagaggactgtttggagccatcgccggctttattgagggaggatggaccggaatgatcgatggctggtacggctatcaccaccagaatgagcagggatctggatatgccgccgatcagaagtctacacagaacgccatcgacggcatcacaaacaaggtgaacagcgtgatcgagaagatgaacacccagtttacagctgtgggcaaggagttcaacaacctggagcggagaatcgagaacctgaacaagaaagtggacgacggcttcctggatatttggacctacaatgccgagctgctcgtgctcctggagaatgagagaaccctggacttccacgacagcaatgtgagaaacctgtacgagaaggtgaagagccagctgaagaacaatgccaaggagatcggcaacggctgctttgagttctaccacaagtgtgacgatgcctgtatggagtctgtgagaaacggcacctacgactaccctaagtatagcgaggagagcaagctgaatagagaggagatcgacggcgtgaaactggaaagcatgggcgtgtatcagatcggaggaggatctggaggaggaagtggctctagaagcctggtgcctagaggatctcctggcagcggatatattcctgaggcccctagagatggacaggcctatgtgagaaaggatggcgaatgggtgctgctgtctacatttctgggacaccaccatcaccaccattgatgagcggccgctgcagatctgatcctttcctgggacccggcaagaaccaaaaactcactctcttcaaggaaatccgtaatgttaaacccgacacgatgaagcttgtcgttggatggaaaggaaaagagttctacagggaaacttggacccgcttcatggaagacagcttccccattgttaacgaccaagaagtgatggatgttttccttgttgtcaacatgcgtcccactagacccaaccgttgttacaaattcctggcccaacacgctctgcgttgcgaccccgactatgtacctcatgacgtgattaggatcgtcgagccttcatgggtgggcagcaacaacgagtaccgcatcagcctggctaagaagggcggcggctgcccaataatgaaccttcactctgagtacaccaactcgttcgaacagttcatcgatcgtgtcatctgggagaacttctacaagcccatcgtttacatcggtaccgactctgctgaagaggaggaaattctccttgaagtttccctggtgttcaaagtaaaggagtttgcaccagacgcacctctgttcactggtccggcgtattaaaacacgatacattgttattagtacatttattaagcgctagattctgtgcgttgttgatttacagacaattgttgtacgtattttaataattcattaaatttataatctttagggtggtatgttagagcgaaaatcaaatgattttcagcgtctttatatctgaatttaaatattaaatcctcaatagatttgtaaaataggtttcgattagtttcaaacaagggttgtttttccgaaccgatggctggactatctaatggattttcgctcaacgccacaaaacttgccaaatcttgtagcagcaatctagctttgtcgatattcgtttgtgttttgttttgtaataaaggttcgacgtcgttcaaaatattatgcgcttttgtatttctttcatcactgtcgttagtgtacaattgactcgacgtaaacacgttaaataaagcttggacatatttaacatcgggcgtgttagctttattaggccgattatcgtcgtcgtcccaaccctcgtcgttagaagttgcttccgaagacgattttgccatagccacacgacgcctattaattgtgtcggctaacacgtccgcgatcaaatttgtagttgagctttttggaattatttctgattgcgggcgtttttgggcgggtttcaatctaactgtgcccgattttaattcagacaacacgttagaaagcgatggtgcaggcggtggtaacatttcagacggcaaatctactaatggcggcggtggtggagctgatgataaatctaccatcggtggaggcgcaggcggggctggcggcggaggcggaggcggaggtggtggcggtgatgcagacggcggtttaggctcaaatgtctctttaggcaacacagtcggcacctcaactattgtactggtttcgggcgccgtttttggtttgaccggtctgagacgagtgcgatttttttcgtttctaatagcttccaacaattgttgtctgtcgtctaaaggtgcagcgggttgaggttccgtcggcattggtggagcgggcggcaattcagacatcgatggtggtggtggtggtggaggcgctggaatgttaggcacgggagaaggtggtggcggcggtgccgccggtataatttgttctggtttagtttgttcgcgcacgattgtgggcaccggcgcaggcgccgctggctgcacaacggaaggtcgtctgcttcgaggcagcgcttggggtggtggcaattcaatattataattggaatacaaatcgtaaaaatctgctataagcattgtaatttcgctatcgtttaccgtgccgatatttaacaaccgctcaatgtaagcaattgtattgtaaagagattgtctcaagctccgcacgccgataacaagccttttcatttttactacagcattgtagtggcgagacacttcgctgtcgtcgacgtacatgtatgctttgttgtcaaaaacgtcgttggcaagctttaaaatatttaaaagaacatctctgttcagcaccactgtgttgtcgtaaatgttgtttttgataatttgcgcttccgcagtatcgacacgttcaaaaaattgatgcgcatcaattttgttgttcctattattgaataaataagattgtacagattcatatctacgattcgtcatggccaccacaaatgctacgctgcaaacgctggtacaattttacgaaaactgcaaaaacgtcaaaactcggtataaaataatcaacgggcgctttggcaaaatatctattttatcgcacaagcccactagcaaattgtatttgcagaaaacaatttcggcgcacaattttaacgctgacgaaataaaagttcaccagttaatgagcgaccacccaaattttataaaaatctattttaatcacggttccatcaacaaccaagtgatcgtgatggactacattgactgtcccgatttatttgaaacactacaaattaaaggcgagctttcgtaccaacttgttagcaatattattagacagctgtgtgaagcgctcaacgatttgcacaagcacaatttcatacacaacgacataaaactcgaaaatgtcttatatttcgaagcacttgatcgcgtgtatgtttgcgattacggattgtgcaaacacgaaaactcacttagcgtgcacgacggcacgttggagtattttagtccggaaaaaattcgacacacaactatgcacgtttcgtttgactggtacgcggcgtgttaacatacaagttgctaaccggcggttcgtaatcatggtcatagctgtttcctgtgtgaaattgttatccgctcacaattccacacaacatacgagccggaagcataaagtgtaaagcctggggtgcctaatgagtgagctaactcacattaattgcgttgcgctcactgcccgctttccagtcgggaaacctgtcgtgccagctgcattaatgaatcggccaacgcgcggggagaggcggtttgcgtattgggcgctcttccgcttcctcgctcactgactcgctgcgctcggtcgttcggctgcggcgagcggtatcagctcactcaaaggcggtaatacggttatccacagaatcaggggataacgcaggaaagaacatgtgagcaaaaggccagcaaaaggccaggaaccgtaaaaaggccgcgttgctggcgtttttccataggctccgcccccctgacgagcatcacaaaaatcgacgctcaagtcagaggtggcgaaacccgacaggactataaagataccaggcgtttccccctggaagctccctcgtgcgctctcctgttccgaccctgccgcttaccggatacctgtccgcctttctcccttcgggaagcgtggcgctttctcatagctcacgctgtaggtatctcagttcggtgtaggtcgttcgctccaagctgggctgtgtgcacgaaccccccgttcagcccgaccgctgcgccttatccggtaactatcgtcttgagtccaacccggtaagacacgacttatcgccactggcagcagccactggtaacaggattagcagagcgaggtatgtaggcggtgctacagagttcttgaagtggtggcctaactacggctacactagaaggacagtatttggtatctgcgctctgctgaagccagttaccttcggaaaaagagttggtagctcttgatccggcaaacaaaccaccgctggtagcggtggtttttttgtttgcaagcagcagattacgcgcagaaaaaaaggatctcaagaagatcctttgatcttttctacggggtctgacgctcagtggaacgaaaactcacgttaagggattttggtcatgagattatcaaaaaggatcttcacctagatccttttaaattaaaaatgaagttttaaatcaatctaaagtatatatgagtaaacttggtctgacagttaccaatgcttaatcagtgaggcacctatctcagcgatctgtctatttcgttcatccatagttgcctgactccccgtcgtgtagataactacgatacgggagggcttaccatctggccccagtgctgcaatgataccgcgagacccacgctcaccggctccagatttatcagcaataaaccagccagccggaagggccgagcgcagaagtggtcctgcaactttatccgcctccatccagtctattaattgttgccgggaagctagagtaagtagttcgccagttaatagtttgcgcaacgttgttgccattgctacaggcatcgtggtgtcacgctcgtcgtttggtatggcttcattcagctccggttcccaacgatcaaggcgagttacatgatcccccatgttgtgcaaaaaagcggttagctccttcggtcctccgatcgttgtcagaagtaagttggccgcagtgttatcactcatggttatggcagcactgcataattctcttactgtcatgccatccgtaagatgcttttctgtgactggtgagtactcaaccaagtcattctgagaatagtgtatgcggcgaccgagttgctcttgcccggcgtcaatacgggataataccgcgccacatagcagaactttaaaagtgctcatcattggaaaacgttcttcggggcgaaaactctcaaggatcttaccgctgttgagatccagttcgatgtaacccactcgtgcacccaactgatcttcagcatcttttactttcaccagcgtttctgggtgagcaaaaacaggaaggcaaaatgccgcaaaaaagggaataagggcgacacggaaatgttgaatactcatactcttcctttttcaatattattgaagcatttatcagggttattgtctcatgagcggatacatatttgaatgtatttagaaaaataaacaaataggggttccgcgcacatttccccgaaaagtgccacctgacgtctaagaaaccattattatcatgacattaacctataaaaataggcgtatcacgaggccctttcgtctcgcgcgtttcggtgatgacggtgaaaacctctgacacatgcagctcccggagacggtcacagcttgtctgtaagcggatgccgggagcagacaagcccgtcagggcgcgtcagcgggtgttggcgggtgtcggggctggcttaactatgcggcatcagagcagattgtactgagagtgcaccatatgcggtgtgaaataccgcacagatgcgtaaggagaaaataccgcatcaggcgccattcgccattcaggctgcgcaactgttgggaagggcgatcggtgcgggcctcttcgctattacgccagctggcgaaagggggatgtgctgcaaggcgattaagttgggtaacgccagggttttcccagtcacgacgttgtaaaacgacggccagtgcc

SEQ ID NO: 103 - DNA, 11413 bp, Artificial Sequence
  Plasmid DNA: 54583
aagctttactcgtaaagcgagttgaaggatcatatttagttgcgtttatgagataagattgaaagcacgtgtaaaatgtttcccgcgcgttggcacaactatttacaatgcggccaagttataaaagattctaatctgatatgttttaaaacacctttgcggcccgagttgtttgcgtacgtgactagcgaagaagatgtgtggaccgcagaacagatagtaaaacaaaaccctagtattggagcaataatcgatttaaccaacacgtctaaatattatgatggtgtgcattttttgcgggcgggcctgttatacaaaaaaattcaagtacctggccagactttgccgcctgaaagcatagttcaagaatttattgacacggtaaaagaatttacagaaaagtgtcccggcatgttggtgggcgtgcactgcacacacggtattaatcgcaccggttacatggtgtgcagatatttaatgcacaccctgggtattgcgccgcaggaagccatagatagattcgaaaaagccagaggtcacaaaattgaaagacaaaattacgttcaagatttattaatttaattaatattatttgcattctttaacaaatactttatcctattttcaaattgttgcgcttcttccagcgaaccaaaactatgcttcgcttgctccgtttagcttgtagccgatcagtggcgttgttccaatcgacggtaggattaggccggatattctccaccacaatgttggcaacgttgatgttacgtttatgcttttggttttccacgtacgtcttttggccggtaatagccgtaaacgtagtgccgtcgcgcgtcacgcacaacaccggatgtttgcgcttgtccgcggggtattgaaccgcgcgatccgacaaatccaccactttggcaactaaatcggtgacctgcgcgtcttttttctgcattatttcgtctttcttttgcatggtttcctggaagccggtgtacatgcggtttagatcagtcatgacgcgcgtgacctgcaaatctttggcctcgatctgcttgtccttgatggcaacgatgcgttcaataaactcttgttttttaacaagttcctcggttttttgcgccaccaccgcttgcagcgcgtttgtgtgctcggtgaatgtcgcaatcagcttagtcaccaactgtttgctctcctcctcccgttgtttgatcgcgggatcgtacttgccggtgcagagcacttgaggaattacttcttctaaaagccattcttgtaattctatggcgtaaggcaatttggacttcataatcagctgaatcacgccggatttagtaatgagcactgtatgcggctgcaaatacagcgggtcgccccttttcacgacgctgttagaggtagggcccccattttggatggtctgctcaaataacgatttgtatttattgtctacatgaacacgtatagctttatcacaaactgtatattttaaactgttagcgacgtccttggccacgaaccggacctgttggtcgcgctctagcacgtaccgcaggttgaacgtatcttctccaaatttaaattctccaattttaacgcgagccattttgatacacgtgtgtcgattttgcaacaactattgttttttaacgcaaactaaacttattgtggtaagcaataattaaatatgggggaacatgcgccgctacaacactcgtcgttatgaacgcagacggcgccggtctcggcgcaagcggctaaaacgtgttgcgcgttcaacgcggcaaacatcgcaaaagccaatagtacagttttgatttgcatattaacggcgattttttaaattatcttatttaataaatagttatgacgcctacaactccccgcccgcgttgactcgctgcacctcgagcagttcgttgacgccttcctccgtgtggccgaacacgtcgagcgggtggtcgatgaccagcggcgtgccgcacgcgacgcacaagtatctgtacaccgaatgatcgtcgggcgaaggcacgtcggcctccaagtggcaatattggcaaattcgaaaatatatacagttgggttgtttgcgcatatctatcgtggcgttgggcatgtacgtccgaacgttgatttgcatgcaagccgaaattaaatcattgcgattagtgcgattaaaacgttgtacatcctcgcttttaatcatgccgtcgattaaatcgcgcaatcgagtcaagtgatcaaagtgtggaataatgttttctttgtattcccgagtcaagcgcagcgcgtattttaacaaactagccatcttgtaagttagtttcatttaatgcaactttatccaataatatattatgtatcgcacgtcaagaattaacaatgcgcccgttgtcgcatctcaacacgactatgatagagatcaaataaagcgcgaattaaatagcttgcgacgcaacgtgcacgatctgtgcacgcgttccggcacgagctttgattgtaataagtttttacgaagcgatgacatgacccccgtagtgacaacgatcacgcccaaaagaactgccgactacaaaattaccgagtatgtcggtgacgttaaaactattaagccatccaatcgaccgttagtcgaatcaggaccgctggtgcgagaagccgcgaagtatggcgaatgcatcgtataacgtgtggagtccgctcattagagcgtcatgtttagacaagaaagctacatatttaattgatcccgatgattttattgataaattgaccctaactccatacacggtattctacaatggcggggttttggtcaaaatttccggactgcgattgtacatgctgttaacggctccgcccactattaatgaaattaaaaattccaattttaaaaaacgcagcaagagaaacatttgtatgaaagaatgcgtagaaggaaagaaaaatgtcgtcgacatgctgaacaacaagattaatatgcctccgtgtataaaaaaaatattgaacgatttgaaagaaaacaatgtaccgcgcggcggtatgtacaggaagaggtttatactaaactgttacattgcaaacgtggtttcgtgtgccaagtgtgaaaaccgatgtttaatcaaggctctgacgcatttctacaaccacgactccaagtgtgtgggtgaagtcatgcatcttttaatcaaatcccaagatgtgtataaaccaccaaactgccaaaaaatgaaaactgtcgacaagctctgtccgtttgctggcaactgcaagggtctcaatcctatttgtaattattgaataataaaacaattataaatgctaaatttgttttttattaacgatacaaaccaaacgcaacaagaacatttgtagtattatctataattgaaaacgcgtagttataatcgctgaggtaatatttaaaatcattttcaaatgattcacagttaatttgcgacaatataattttattttcacataaactagacgccttgtcgtcttcttcttcgtattccttctctttttcatttttctcctcataaaaattaacatagttattatcgtatccatatatgtatctatcgtatagagtaaattttttgttgtcataaatatatatgtcttttttaatggggtgtatagtaccgctgcgcatagtttttctgtaatttacaacagtgctattttctggtagttcttcggagtgtgttgctttaattattaaatttatataatcaatgaatttgggatcgtcggttttgtacaatatgttgccggcatagtacgcagcttcttctagttcaattacaccattttttagcagcaccggattaacataactttccaaaatgttgtacgaaccgttaaacaaaaacagttcacctcccttttctatactattgtctgcgagcagttgtttgttgttaaaaataacagccattgtaatgagacgcacaaactaatatcacaaactggaaatgtctatcaatatatagttgctgatatcatggagataattaaaatgataaccatctcgcaaataaataagtattttactgttttcgtaacagttttgtaataaaaaaacctataaatattccggattattcataccgtcccaccatcgggcgcggatctatgctactagtaaatcagtcacaccaaggcttcaataaggaacacacaagcaagatggtaagcgctattgttttatatgtgcttttggcggcggcggcgcattctgcctttgcggcggatcccggggatacaatctgtattggctaccacgccaacaatagcaccgataccgtggatacagtgctggagaagaatgtgaccgtgacccactctgtgaatctgctggaggatagccacaatggcaagctgtgtaagctgaaaggaattgcccctctgcagctgggcaaatgtaatattgccggctggctgctgggaaatcctgaatgtgatctgctgctgacagccagcagctggtcttatatcgtggagaccagcaatagcgagaatggcacctgttaccctggcgacttcatcgattacgaggagctgagagaacagctgtctagcgtgtccagcttcgagaagttcgagatcttccctaagacaagcagctggcctaatcacgagacaacaaagggagtgacagccgcctgttcttatgccggagccagctccttttacagaaacctgctgtggctgacaaagaagggcagcagctaccctaagctgtctaagagctacgtgaacaacaagggcaaagaagtgctggtgctgtggggagtgcaccaccctcctacaggaacagatcagcagagcctgtaccagaatgccgatgcctatgtgtctgtgggcagcagcaagtacaacagaagattcacccctgaaattgccgccagacccaaagtgagagatcaggccggcagaatgaattactactggaccctgctggaacctggcgataccatcacatttgaggccaccggaaatctgattgccccttggtatgcctttgccctgaatagaggctctggctctggcatcattacatctgatgcccctgtgcacgactgtaataccaagtgtcagacacctcacggcgccattaatagcagcctgcccttccagaatattcaccctgtgaccatcggcgagtgtcctaagtatgtgaggagcaccaaactgagaatggccaccggcctgagaaatatccctcagagagagaccagaggactgtttggagccatcgccggctttattgagggaggatggaccggaatgatcgatggctggtacggctatcaccaccagaatgagcagggatctggatatgccgccgatcagaagtctacacagaacgccatcgacggcatcacaaacaaggtgaacagcgtgatcgagaagatgaacacccagtttacagctgtgggcaaggagttcaacaacctggagcggagaatcgagaacctgaacaagaaagtggacgacggcttcctggatatttggacctacaatgccgagctgctcgtgctcctggagaatgagagaaccctggacttccacgacagcaatgtgagaaacctgtacgagaaggtgaagagccagctgaagaacaatgccaaggagatcggcaacggctgctttgagttctaccacaagtgtgacgatgcctgtatggagtctgtgagaaacggcacctacgactaccctaagtatagcgaggagagcaagctgaatagagaggagatcggaggaggatctggaggaggaagtggctctagaagcctggtgcctagaggatctcctggcagcggatatattcctgaggcccctagagatggacaggcctatgtgagaaaggatggcgaatgggtgctgctgtctacatttctgggacaccaccatcaccaccattgatgagcggccgctgcagatctgatcctttcctgggacccggcaagaaccaaaaactcactctcttcaaggaaatccgtaatgttaaacccgacacgatgaagcttgtcgttggatggaaaggaaaagagttctacagggaaacttggacccgcttcatggaagacagcttccccattgttaacgaccaagaagtgatggatgttttccttgttgtcaacatgcgtcccactagacccaaccgttgttacaaattcctggcccaacacgctctgcgttgcgaccccgactatgtacctcatgacgtgattaggatcgtcgagccttcatgggtgggcagcaacaacgagtaccgcatcagcctggctaagaagggcggcggctgcccaataatgaaccttcactctgagtacaccaactcgttcgaacagttcatcgatcgtgtcatctgggagaacttctacaagcccatcgtttacatcggtaccgactctgctgaagaggaggaaattctccttgaagtttccctggtgttcaaagtaaaggagtttgcaccagacgcacctctgttcactggtccggcgtattaaaacacgatacattgttattagtacatttattaagcgctagattctgtgcgttgttgatttacagacaattgttgtacgtattttaataattcattaaatttataatctttagggtggtatgttagagcgaaaatcaaatgattttcagcgtctttatatctgaatttaaatattaaatcctcaatagatttgtaaaataggtttcgattagtttcaaacaagggttgtttttccgaaccgatggctggactatctaatggattttcgctcaacgccacaaaacttgccaaatcttgtagcagcaatctagctttgtcgatattcgtttgtgttttgttttgtaataaaggttcgacgtcgttcaaaatattatgcgcttttgtatttctttcatcactgtcgttagtgtacaattgactcgacgtaaacacgttaaataaagcttggacatatttaacatcgggcgtgttagctttattaggccgattatcgtcgtcgtcccaaccctcgtcgttagaagttgcttccgaagacgattttgccatagccacacgacgcctattaattgtgtcggctaacacgtccgcgatcaaatttgtagttgagctttttggaattatttctgattgcgggcgtttttgggcgggtttcaatctaactgtgcccgattttaattcagacaacacgttagaaagcgatggtgcaggcggtggtaacatttcagacggcaaatctactaatggcggcggtggtggagctgatgataaatctaccatcggtggaggcgcaggcggggctggcggcggaggcggaggcggaggtggtggcggtgatgcagacggcggtttaggctcaaatgtctctttaggcaacacagtcggcacctcaactattgtactggtttcgggcgccgtttttggtttgaccggtctgagacgagtgcgatttttttcgtttctaatagcttccaacaattgttgtctgtcgtctaaaggtgcagcgggttgaggttccgtcggcattggtggagcgggcggcaattcagacatcgatggtggtggtggtggtggaggcgctggaatgttaggcacgggagaaggtggtggcggcggtgccgccggtataatttgttctggtttagtttgttcgcgcacgattgtgggcaccggcgcaggcgccgctggctgcacaacggaaggtcgtctgcttcgaggcagcgcttggggtggtggcaattcaatattataattggaatacaaatcgtaaaaatctgctataagcattgtaatttcgctatcgtttaccgtgccgatatttaacaaccgctcaatgtaagcaattgtattgtaaagagattgtctcaagctccgcacgccgataacaagccttttcatttttactacagcattgtagtggcgagacacttcgctgtcgtcgacgtacatgtatgctttgttgtcaaaaacgtcgttggcaagctttaaaatatttaaaagaacatctctgttcagcaccactgtgttgtcgtaaatgttgtttttgataatttgcgcttccgcagtatcgacacgttcaaaaaattgatgcgcatcaattttgttgttcctattattgaataaataagattgtacagattcatatctacgattcgtcatggccaccacaaatgctacgctgcaaacgctggtacaattttacgaaaactgcaaaaacgtcaaaactcggtataaaataatcaacgggcgctttggcaaaatatctattttatcgcacaagcccactagcaaattgtatttgcagaaaacaatttcggcgcacaattttaacgctgacgaaataaaagttcaccagttaatgagcgaccacccaaattttataaaaatctattttaatcacggttccatcaacaaccaagtgatcgtgatggactacattgactgtcccgatttatttgaaacactacaaattaaaggcgagctttcgtaccaacttgttagcaatattattagacagctgtgtgaagcgctcaacgatttgcacaagcacaatttcatacacaacgacataaaactcgaaaatgtcttatatttcgaagcacttgatcgcgtgtatgtttgcgattacggattgtgcaaacacgaaaactcacttagcgtgcacgacggcacgttggagtattttagtccggaaaaaattcgacacacaactatgcacgtttcgtttgactggtacgcggcgtgttaacatacaagttgctaaccggcggttcgtaatcatggtcatagctgtttcctgtgtgaaattgttatccgctcacaattccacacaacatacgagccggaagcataaagtgtaaagcctggggtgcctaatgagtgagctaactcacattaattgcgttgcgctcactgcccgctttccagtcgggaaacctgtcgtgccagctgcattaatgaatcggccaacgcgcggggagaggcggtttgcgtattgggcgctcttccgcttcctcgctcactgactcgctgcgctcggtcgttcggctgcggcgagcggtatcagctcactcaaaggcggtaatacggttatccacagaatcaggggataacgcaggaaagaacatgtgagcaaaaggccagcaaaaggccaggaaccgtaaaaaggccgcgttgctggcgtttttccataggctccgcccccctgacgagcatcacaaaaatcgacgctcaagtcagaggtggcgaaacccgacaggactataaagataccaggcgtttccccctggaagctccctcgtgcgctctcctgttccgaccctgccgcttaccggatacctgtccgcctttctcccttcgggaagcgtggcgctttctcatagctcacgctgtaggtatctcagttcggtgtaggtcgttcgctccaagctgggctgtgtgcacgaaccccccgttcagcccgaccgctgcgccttatccggtaactatcgtcttgagtccaacccggtaagacacgacttatcgccactggcagcagccactggtaacaggattagcagagcgaggtatgtaggcggtgctacagagttcttgaagtggtggcctaactacggctacactagaaggacagtatttggtatctgcgctctgctgaagccagttaccttcggaaaaagagttggtagctcttgatccggcaaacaaaccaccgctggtagcggtggtttttttgtttgcaagcagcagattacgcgcagaaaaaaaggatctcaagaagatcctttgatcttttctacggggtctgacgctcagtggaacgaaaactcacgttaagggattttggtcatgagattatcaaaaaggatcttcacctagatccttttaaattaaaaatgaagttttaaatcaatctaaagtatatatgagtaaacttggtctgacagttaccaatgcttaatcagtgaggcacctatctcagcgatctgtctatttcgttcatccatagttgcctgactccccgtcgtgtagataactacgatacgggagggcttaccatctggccccagtgctgcaatgataccgcgagacccacgctcaccggctccagatttatcagcaataaaccagccagccggaagggccgagcgcagaagtggtcctgcaactttatccgcctccatccagtctattaattgttgccgggaagctagagtaagtagttcgccagttaatagtttgcgcaacgttgttgccattgctacaggcatcgtggtgtcacgctcgtcgtttggtatggcttcattcagctccggttcccaacgatcaaggcgagttacatgatcccccatgttgtgcaaaaaagcggttagctccttcggtcctccgatcgttgtcagaagtaagttggccgcagtgttatcactcatggttatggcagcactgcataattctcttactgtcatgccatccgtaagatgcttttctgtgactggtgagtactcaaccaagtcattctgagaatagtgtatgcggcgaccgagttgctcttgcccggcgtcaatacgggataataccgcgccacatagcagaactttaaaagtgctcatcattggaaaacgttcttcggggcgaaaactctcaaggatcttaccgctgttgagatccagttcgatgtaacccactcgtgcacccaactgatcttcagcatcttttactttcaccagcgtttctgggtgagcaaaaacaggaaggcaaaatgccgcaaaaaagggaataagggcgacacggaaatgttgaatactcatactcttcctttttcaatattattgaagcatttatcagggttattgtctcatgagcggatacatatttgaatgtatttagaaaaataaacaaataggggttccgcgcacatttccccgaaaagtgccacctgacgtctaagaaaccattattatcatgacattaacctataaaaataggcgtatcacgaggccctttcgtctcgcgcgtttcggtgatgacggtgaaaacctctgacacatgcagctcccggagacggtcacagcttgtctgtaagcggatgccgggagcagacaagcccgtcagggcgcgtcagcgggtgttggcgggtgtcggggctggcttaactatgcggcatcagagcagattgtactgagagtgcaccatatgcggtgtgaaataccgcacagatgcgtaaggagaaaataccgcatcaggcgccattcgccattcaggctgcgcaactgttgggaagggcgatcggtgcgggcctcttcgctattacgccagctggcgaaagggggatgtgctgcaaggcgattaagttgggtaacgccagggttttcccagtcacgacgttgtaaaacgacggccagtgcc

SEQ ID NO: 104 - DNA, 6135 bp, Artificial Sequence
  Plasmid DNA: 54680
tcgcgcgtttcggtgatgacggtgaaaacctctgacacatgcagctcccggagacggtcacagcttgtctgtaagcggatgccgggagcagacaagcccgtcagggcgcgtcagcgggtgttggcgggtgtcggggctggcttaactatgcggcatcagagcagattgtactgagagtgcaccatatgcggtgtgaaataccgcacagatgcgtaaggagaaaataccgcatcagattggctattggccattgcatacgttgtatccatatcataatatgtacatttatattggctcatgtccaacattaccgccatgttgacattgattattgactagttattaatagtaatcaattacgggaacttccatagcccatatatggagttccgcgttacataacttacgggaatttccaaacctggctgaccgcccaacgacccccgcccattgacgtcaataatgacgtatgttcccatagtaacgccaatagggaacttccattgacgtcaatgggtggagtatttacggtaaactgcccacttgggaatttccaagtgtatcatatgccaagtacgccccctattgacgtcaatgacgggaacttccataagcttgcattatgcccagtacatgaccttatgggaatttcctacttggcagtacatctacgtattagtcatcgctattaccatggtgatgcggttttggcagtacatcaatgggcgtggatagcggtttgactcacgggaacttccaagtctccaccccattgacgtcaatgggagtttgttttgactcaccaaaatcaacgggaattcccaaaatgtcgtaacaactccgccccattgacgcaaatgggcggtaggcgtgtacggtgggaggtctatataagcagagctcgtttagtgaaccgtcagatcgcctggagacgccatccacgctgttttgacctccatagaagacaccgggaccgatccagcctccatcggctcgcatctctccttcacgcgcccgccgccctacctgaggccgccatccacgccggttgagtcgcgttctgccgcctcccgcctgtggtgcctcctgaactgcgtccgccgtctaggtaagtttaaagctcaggtcgagaccgggcctttgtccggcgctcccttggagcctacctagactcagccggctctccacgctttgcctgaccctgcttgctcaactctagttaacggtggagggcagtgtagtctgagcagtactcgttgctgccgcgcgcgccaccagacataatagctgacagactaacagactgttcctttccatgggtcttttctgcagtcaccgtcgtcgacacgtgtgatcagatatcgcggccgctctagagatatcgccaccatgaacacccagatcatcgtgatcctggtgctgggactgagcatggtgaggagcgacaagatctgtctgggacaccacgccgtggccaatggcaccaaggtgaacaccctgacagagaagggagtggaggtggtgaatgccacagagaccgtggagatcaccggcatcaacaaagtgtgtaccaagggcaagaaagccgtggatctgggcagctgtggcatcctgggcacaatcatcggacccccccagtgtgatagccacctgaagttcaaggccgacctgatcatcgagcggagaaacagcagcgacatctgctaccctggcaagttcaccaatgaggaggccctgagacagatcatcagagagagcggcggcatcgacaaagaacccatgggcttcaggtacagcggcatcaagacagatggagccacctccgcctgtaagagaaccgtgtccagcttctacagcgagatgaagtggctgctgtccagcaaagccaaccaggtgttcccccagctgaaccagacctaccggaacaacagaaaggagcccgccctgattgtctggggagtgcaccacagctctagcctggacgagcagaacaagctgtatggcgccggaaacaagctgatcacagtgggcagcagcaagtaccagcagagcttcagcccttctcctggcgataggcctaaggtgaacggacaggccggaagaatcgacttccactggatgctgctggaccctggcgataccgtgaccttcaccttcaacggcgcctttatcgcccctgatagggccaccttcctgagaagcaatgcccctagcggcgtggagtataacggcaagagcctgggcattcagagcgatgcccagatcgatgagtcttgtgagggcgagtgcttttactctggcggcaccatcaatagccctctgcccttccagaacatcgatagctgggctgtgggaagatgtcccagatacgtgaagcagagcagcctgcctctggccctgggcatgaagaatgtgccccagagagagaccagaggactgtttggagccatcgccggattcatcgagaatggctgggagggactgatcgatggctggtacggcttcagacaccagaatgcccagggacagggaacagccgccgattacaagtctacacaggccgctattgaccagatcacaggcaagctgaaccggctgatcgagaaaaccaacacccagttcgagctgatcgacaacgagttcaccgaggtggagcagcagatcggcaacgtgatcaactggaccagagacagcctgaccgagatctggagctacaatgccgaactgctggtggccatggagaatcagcacaccatcgacctggccgactccgagatgaataagctgtacgagagagtgaggaggcagctgagagagaatgccgaggaggacggcacaggctgcttcgagatcttccacagatgtgacgaccagtgtatggagagcatcaggaacaacacctacaaccacaccgagtacagacaggaagccctgcagaaccggatcatgatcaaccccgtgaagctgtctggcggctacaaggatgtgatcctgtggttcagctttggcgccagctgtgtgatgctgctggccattgccatgggcctgatcttcatgtgtgtgaagaacggcaacctgaggtgtaccatctgtatctgatgaacacgtgggatccagatctgctgtgccttctagttgccagccatctgttgtttgcccctcccccgtgccttccttgaccctggaaggtgccactcccactgtcctttcctaataaaatgaggaaattgcatcgcattgtctgagtaggtgtcattctattctggggggtggggtggggcaggacagcaagggggaggattgggaagacaatagcaggcatgctggggatgcggtgggctctatgggtacccaggtgctgaagaattgacccggttcctcctgggccagaaagaagcaggcacatccccttctctgtgacacaccctgtccacgcccctggttcttagttccagccccactcataggacactcatagctcaggagggctccgccttcaatcccacccgctaaagtacttggagcggtctctccctccctcatcagcccaccaaaccaaacctagcctccaagagtgggaagaaattaaagcaagataggctattaagtgcagagggagagaaaatgcctccaacatgtgaggaagtaatgagagaaatcatagaattttaaggccatgatttaaggccatcatggccttaatcttccgcttcctcgctcactgactcgctgcgctcggtcgttcggctgcggcgagcggtatcagctcactcaaaggcggtaatacggttatccacagaatcaggggataacgcaggaaagaacatgtgagcaaaaggccagcaaaaggccaggaaccgtaaaaaggccgcgttgctggcgtttttccataggctccgcccccctgacgagcatcacaaaaatcgacgctcaagtcagaggtggcgaaacccgacaggactataaagataccaggcgtttccccctggaagctccctcgtgcgctctcctgttccgaccctgccgcttaccggatacctgtccgcctttctcccttcgggaagcgtggcgctttctcatagctcacgctgtaggtatctcagttcggtgtaggtcgttcgctccaagctgggctgtgtgcacgaaccccccgttcagcccgaccgctgcgccttatccggtaactatcgtcttgagtccaacccggtaagacacgacttatcgccactggcagcagccactggtaacaggattagcagagcgaggtatgtaggcggtgctacagagttcttgaagtggtggcctaactacggctacactagaagaacagtatttggtatctgcgctctgctgaagccagttaccttcggaaaaagagttggtagctcttgatccggcaaacaaaccaccgctggtagcggtggtttttttgtttgcaagcagcagattacgcgcagaaaaaaaggatctcaagaagatcctttgatcttttctacggggtctgacgctcagtggaacgaaaactcacgttaagggattttggtcatgagattatcaaaaaggatcttcacctagatccttttaaattaaaaatgaagttttaaatcaatctaaagtatatatgagtaaacttggtctgacagttaccaatgcttaatcagtgaggcacctatctcagcgatctgtctatttcgttcatccatagttgcctgactcggggggggggggcgctgaggtctgcctcgtgaagaaggtgttgctgactcataccaggcctgaatcgccccatcatccagccagaaagtgagggagccacggttgatgagagctttgttgtaggtggaccagttggtgattttgaacttttgctttgccacggaacggtctgcgttgtcgggaagatgcgtgatctgatccttcaactcagcaaaagttcgatttattcaacaaagccgccgtcccgtcaagtcagcgtaatgctctgccagtgttacaaccaattaaccaattctgattagaaaaactcatcgagcatcaaatgaaactgcaatttattcatatcaggattatcaataccatatttttgaaaaagccgtttctgtaatgaaggagaaaactcaccgaggcagttccataggatggcaagatcctggtatcggtctgcgattccgactcgtccaacatcaatacaacctattaatttcccctcgtcaaaaataaggttatcaagtgagaaatcaccatgagtgacgactgaatccggtgagaatggcaaaagcttatgcatttctttccagacttgttcaacaggccagccattacgctcgtcatcaaaatcactcgcatcaaccaaaccgttattcattcgtgattgcgcctgagcgagacgaaatacgcgatcgctgttaaaaggacaattacaaacaggaatcgaatgcaaccggcgcaggaacactgccagcgcatcaacaatattttcacctgaatcaggatattcttctaatacctggaatgctgttttcccggggatcgcagtggtgagtaaccatgcatcatcaggagtacggataaaatgcttgatggtcggaagaggcataaattccgtcagccagtttagtctgaccatctcatctgtaacatcattggcaacgctacctttgccatgtttcagaaacaactctggcgcatcgggcttcccatacaatcgatagattgtcgcacctgattgcccgacattatcgcgagcccatttatacccatataaatcagcatccatgttggaatttaatcgcggcctcgagcaagacgtttcccgttgaatatggctcataacaccccttgtattactgtttatgtaagcagacagttttattgttcatgatgatatatttttatcttgtgcaatgtaacatcagagattttgagacacaacgtggctttccccccccccccattattgaagcatttatcagggttattgtctcatgagcggatacatatttgaatgtatttagaaaaataaacaaataggggttccgcgcacatttccccgaaaagtgccacctgacgtctaagaaaccattattatcatgacattaacctataaaaataggcgtatcacgaggccctttcgtc

SEQ ID NO: 105 - DNA, 6108 bp, Artificial Sequence
  Plasmid DNA: 54681
tcgcgcgtttcggtgatgacggtgaaaacctctgacacatgcagctcccggagacggtcacagcttgtctgtaagcggatgccgggagcagacaagcccgtcagggcgcgtcagcgggtgttggcgggtgtcggggctggcttaactatgcggcatcagagcagattgtactgagagtgcaccatatgcggtgtgaaataccgcacagatgcgtaaggagaaaataccgcatcagattggctattggccattgcatacgttgtatccatatcataatatgtacatttatattggctcatgtccaacattaccgccatgttgacattgattattgactagttattaatagtaatcaattacgggaacttccatagcccatatatggagttccgcgttacataacttacgggaatttccaaacctggctgaccgcccaacgacccccgcccattgacgtcaataatgacgtatgttcccatagtaacgccaatagggaacttccattgacgtcaatgggtggagtatttacggtaaactgcccacttgggaatttccaagtgtatcatatgccaagtacgccccctattgacgtcaatgacgggaacttccataagcttgcattatgcccagtacatgaccttatgggaatttcctacttggcagtacatctacgtattagtcatcgctattaccatggtgatgcggttttggcagtacatcaatgggcgtggatagcggtttgactcacgggaacttccaagtctccaccccattgacgtcaatgggagtttgttttgactcaccaaaatcaacgggaattcccaaaatgtcgtaacaactccgccccattgacgcaaatgggcggtaggcgtgtacggtgggaggtctatataagcagagctcgtttagtgaaccgtcagatcgcctggagacgccatccacgctgttttgacctccatagaagacaccgggaccgatccagcctccatcggctcgcatctctccttcacgcgcccgccgccctacctgaggccgccatccacgccggttgagtcgcgttctgccgcctcccgcctgtggtgcctcctgaactgcgtccgccgtctaggtaagtttaaagctcaggtcgagaccgggcctttgtccggcgctcccttggagcctacctagactcagccggctctccacgctttgcctgaccctgcttgctcaactctagttaacggtggagggcagtgtagtctgagcagtactcgttgctgccgcgcgcgccaccagacataatagctgacagactaacagactgttcctttccatgggtcttttctgcagtcaccgtcgtcgacacgtgtgatcagatatcgcggccgctctagagatatcgccaccatgtacaaggtggtggtgatcattgccctgctgggagctgtgagaggcctggataagatctgtctgggacaccacgccgtggccaatggcaccatcgtgaaaaccctgaccaacgtgcaggaggaggtcacaaacgccaccgagaccgtggagagcaccagcctgaaccggctgtgtatgaagggccggagctacaaggatctgggcaactgtcaccctatcggcatgctgattggcacacccgcctgtgatctgcacctgaccggcacatgggataccctgatcgagcggaagaatgccatcgcctactgttaccctggcaccaccatcaatgagggagccctgaggcagaaaatcatggagagcggcggcatcagcaagacaagcaccggctttgcctatggcagcagcatcaatagcgccggaaccaccaaggcctgtatgagaaacggcggcgacagcttttatgccgaggtgaagtggctggtgtccaaggacaagggccagaactttccccagaccaccaacacctacaggaacaccgatacagccgagcacctgatcatctggggcatccaccacccatctagcacccaggagaagaacgatctgtacggcacacagagcctgtctatctctgtgggcagcagcacctaccagaacaacttcgtgcctgtggtgagagccagacctcaggtgaacggccagagcggcagaatcgatttccactggaccctggtgcagcctggcgacaatatcaccttcagccacaacggaggaagaatcgcccctagcagagtgtctaaactggtgggcagaggcctgggaattcagagcgaggccagcatcgataatggctgtgagagcaagtgcttttggagaggcggctccatcaataccaagctgcccttccagaacctgagccctagaacagtgggccagtgccccaagtacgtgaacaagaaaagcctgatgctggccaccggcatgagaaatgtgccccagagagagaccagaggactgtttggagccatcgccggattcatcgagaatggatgggagggcatggtggatggctggtacggcttcagacaccagaatgcccagggaacaggacaggccgccgattacaagtctacacaggccgccatcgatcagatcaccggcaagctgaacaggctgatcgagaaaaccaacaccgagttcgagagcatcgagagcgagttcagcgagatcgagcaccagatcggcaacgtgatcaactggaccaaggacagcatcaccgacatctggacctatcaggccgaactgctggtggccatggagaatcagcacaccatcgacatggccgatagcgagatgctgaacctgtacgagagagtgaggaagcagctgagacagaacgccgaggaggatggcaagggctgcttcgagatctaccacacctgtgacgacagctgtatggagagcatccggaacaacacctacgaccacagccagtatagagaggaggccctgctgaacagactgaacatcaacagcgtgaagctgtccagcggctacaaggacatcatcctgtggttcagctttggcgccagctgttttgtgctgctggccgccgtgatgggactggtgttcttctgcctgaagaacggcaacatgcagtgcaccatctgtatctgatgaacacgtgggatccagatctgctgtgccttctagttgccagccatctgttgtttgcccctcccccgtgccttccttgaccctggaaggtgccactcccactgtcctttcctaataaaatgaggaaattgcatcgcattgtctgagtaggtgtcattctattctggggggtggggtggggcaggacagcaagggggaggattgggaagacaatagcaggcatgctggggatgcggtgggctctatgggtacccaggtgctgaagaattgacccggttcctcctgggccagaaagaagcaggcacatccccttctctgtgacacaccctgtccacgcccctggttcttagttccagccccactcataggacactcatagctcaggagggctccgccttcaatcccacccgctaaagtacttggagcggtctctccctccctcatcagcccaccaaaccaaacctagcctccaagagtgggaagaaattaaagcaagataggctattaagtgcagagggagagaaaatgcctccaacatgtgaggaagtaatgagagaaatcatagaattttaaggccatgatttaaggccatcatggccttaatcttccgcttcctcgctcactgactcgctgcgctcggtcgttcggctgcggcgagcggtatcagctcactcaaaggcggtaatacggttatccacagaatcaggggataacgcaggaaagaacatgtgagcaaaaggccagcaaaaggccaggaaccgtaaaaaggccgcgttgctggcgtttttccataggctccgcccccctgacgagcatcacaaaaatcgacgctcaagtcagaggtggcgaaacccgacaggactataaagataccaggcgtttccccctggaagctccctcgtgcgctctcctgttccgaccctgccgcttaccggatacctgtccgcctttctcccttcgggaagcgtggcgctttctcatagctcacgctgtaggtatctcagttcggtgtaggtcgttcgctccaagctgggctgtgtgcacgaaccccccgttcagcccgaccgctgcgccttatccggtaactatcgtcttgagtccaacccggtaagacacgacttatcgccactggcagcagccactggtaacaggattagcagagcgaggtatgtaggcggtgctacagagttcttgaagtggtggcctaactacggctacactagaagaacagtatttggtatctgcgctctgctgaagccagttaccttcggaaaaagagttggtagctcttgatccggcaaacaaaccaccgctggtagcggtggtttttttgtttgcaagcagcagattacgcgcagaaaaaaaggatctcaagaagatcctttgatcttttctacggggtctgacgctcagtggaacgaaaactcacgttaagggattttggtcatgagattatcaaaaaggatcttcacctagatccttttaaattaaaaatgaagttttaaatcaatctaaagtatatatgagtaaacttggtctgacagttaccaatgcttaatcagtgaggcacctatctcagcgatctgtctatttcgttcatccatagttgcctgactcggggggggggggcgctgaggtctgcctcgtgaagaaggtgttgctgactcataccaggcctgaatcgccccatcatccagccagaaagtgagggagccacggttgatgagagctttgttgtaggtggaccagttggtgattttgaacttttgctttgccacggaacggtctgcgttgtcgggaagatgcgtgatctgatccttcaactcagcaaaagttcgatttattcaacaaagccgccgtcccgtcaagtcagcgtaatgctctgccagtgttacaaccaattaaccaattctgattagaaaaactcatcgagcatcaaatgaaactgcaatttattcatatcaggattatcaataccatatttttgaaaaagccgtttctgtaatgaaggagaaaactcaccgaggcagttccataggatggcaagatcctggtatcggtctgcgattccgactcgtccaacatcaatacaacctattaatttcccctcgtcaaaaataaggttatcaagtgagaaatcaccatgagtgacgactgaatccggtgagaatggcaaaagcttatgcatttctttccagacttgttcaacaggccagccattacgctcgtcatcaaaatcactcgcatcaaccaaaccgttattcattcgtgattgcgcctgagcgagacgaaatacgcgatcgctgttaaaaggacaattacaaacaggaatcgaatgcaaccggcgcaggaacactgccagcgcatcaacaatattttcacctgaatcaggatattcttctaatacctggaatgctgttttcccggggatcgcagtggtgagtaaccatgcatcatcaggagtacggataaaatgcttgatggtcggaagaggcataaattccgtcagccagtttagtctgaccatctcatctgtaacatcattggcaacgctacctttgccatgtttcagaaacaactctggcgcatcgggcttcccatacaatcgatagattgtcgcacctgattgcccgacattatcgcgagcccatttatacccatataaatcagcatccatgttggaatttaatcgcggcctcgagcaagacgtttcccgttgaatatggctcataacaccccttgtattactgtttatgtaagcagacagttttattgttcatgatgatatatttttatcttgtgcaatgtaacatcagagattttgagacacaacgtggctttccccccccccccattattgaagcatttatcagggttattgtctcatgagcggatacatatttgaatgtatttagaaaaataaacaaataggggttccgcgcacatttccccgaaaagtgccacctgacgtctaagaaaccattattatcatgacattaacctataaaaataggcgtatcacgaggccctttcgtc

SEQ ID NO: 106 - DNA, 6132 bp, Artificial Sequence
  Plasmid DNA: 54682
tcgcgcgtttcggtgatgacggtgaaaacctctgacacatgcagctcccggagacggtcacagcttgtctgtaagcggatgccgggagcagacaagcccgtcagggcgcgtcagcgggtgttggcgggtgtcggggctggcttaactatgcggcatcagagcagattgtactgagagtgcaccatatgcggtgtgaaataccgcacagatgcgtaaggagaaaataccgcatcagattggctattggccattgcatacgttgtatccatatcataatatgtacatttatattggctcatgtccaacattaccgccatgttgacattgattattgactagttattaatagtaatcaattacgggaacttccatagcccatatatggagttccgcgttacataacttacgggaatttccaaacctggctgaccgcccaacgacccccgcccattgacgtcaataatgacgtatgttcccatagtaacgccaatagggaacttccattgacgtcaatgggtggagtatttacggtaaactgcccacttgggaatttccaagtgtatcatatgccaagtacgccccctattgacgtcaatgacgggaacttccataagcttgcattatgcccagtacatgaccttatgggaatttcctacttggcagtacatctacgtattagtcatcgctattaccatggtgatgcggttttggcagtacatcaatgggcgtggatagcggtttgactcacgggaacttccaagtctccaccccattgacgtcaatgggagtttgttttgactcaccaaaatcaacgggaattcccaaaatgtcgtaacaactccgccccattgacgcaaatgggcggtaggcgtgtacggtgggaggtctatataagcagagctcgtttagtgaaccgtcagatcgcctggagacgccatccacgctgttttgacctccatagaagacaccgggaccgatccagcctccatcggctcgcatctctccttcacgcgcccgccgccctacctgaggccgccatccacgccggttgagtcgcgttctgccgcctcccgcctgtggtgcctcctgaactgcgtccgccgtctaggtaagtttaaagctcaggtcgagaccgggcctttgtccggcgctcccttggagcctacctagactcagccggctctccacgctttgcctgaccctgcttgctcaactctagttaacggtggagggcagtgtagtctgagcagtactcgttgctgccgcgcgcgccaccagacataatagctgacagactaacagactgttcctttccatgggtcttttctgcagtcaccgtcgtcgacacgtgtgatcagatatcgcggccgctctagagatatcgccaccatgatcgccctgattctggtggccctggccctgtctcacacagcctacagccagatcaccaatggcaccaccggcaaccctatcatctgtctgggacaccacgccgtggagaatggcaccagcgtgaaaaccctgaccgacaaccatgtggaagtggtgtctgccaaggaactggtggagaccaaccacaccgatgagctgtgtcctagccctctgaaactggtggatggccaggattgccacctgatcaatggcgccctgggatctcctggatgtgacaggctgcaggacaccacctgggatgtgttcatcgagagacccaccgccgtggatacctgctaccccttcgacgtgcctgattaccagagcctgaggagcattctggccagctctggcagcctggagtttatcgccgagcagttcacctggaatggcgtgaaagtggatggcagcagctctgcctgtctgagaggcggcaggaacagcttcttcagcaggctgaactggctgaccaaggccaccaacggcaattacggccccatcaacgtgaccaaggagaacacaggcagctatgtgagactgtatctgtggggagtgcaccaccctagcagcgataacgagcagaccgacctgtataaggtggccaccggcagagtgacagtgagcaccaggagcgaccagatcagcatcgtgcccaacatcggcagcagacccagagtgagaaaccagagcggcaggatcagcatctactggaccctggtgaatcctggcgacagcatcatcttcaacagcatcggcaacctgattgctcctaggggacactacaagatcagcaagagcaccaagtccaccgtgctgaagagcgacaagagaatcggcagctgtaccagcccttgcctgacagataagggcagcatccagtccgataagcccttccagaacgtgtccagaatcgccatcggcaactgccctaagtatgtgaagcagggctctctgatgctggccacaggcatgagaaacatcccccagagagagaccagaggactgtttggagccatcgccggattcatcgagaatggctggcagggactgatcgatggctggtacggcttcagacaccagaatgccgagggaacaggaacagccgccgatctgaagtctacacaggccgctattgaccagatcaacggcaagctgaaccggctgatcgagaaaaccaacgagaagtaccaccagatcgagaaggaattcgagcaggtggagggcagaatccaggacctggagaagtacgtggaggacaccaagatcgacctgtggagctacaatgccgaactgctggtggccctggagaatcagcacaccatcgacgtgaccgacagcgagatgaacaagctgttcgagagagtgaggaggcagctgagagagaacgccgaggatcagggcaatggctgcttcgagatcttccaccagtgtgacaacaactgtatcgagagcatccggaacggcacctacgaccacaacatctacagggacgaggccatcaacaaccggatcaagatcaaccctgtgaccctgaccatgggctacaaggacatcatcctgtggatcagcttcagcatgagctgcttcgtgttcgtggccctgatcctgggatttgtgctgtgggcctgccagaacggcaatatccggtgccagatctgtatctgatgaacacgtgggatccagatctgctgtgccttctagttgccagccatctgttgtttgcccctcccccgtgccttccttgaccctggaaggtgccactcccactgtcctttcctaataaaatgaggaaattgcatcgcattgtctgagtaggtgtcattctattctggggggtggggtggggcaggacagcaagggggaggattgggaagacaatagcaggcatgctggggatgcggtgggctctatgggtacccaggtgctgaagaattgacccggttcctcctgggccagaaagaagcaggcacatccccttctctgtgacacaccctgtccacgcccctggttcttagttccagccccactcataggacactcatagctcaggagggctccgccttcaatcccacccgctaaagtacttggagcggtctctccctccctcatcagcccaccaaaccaaacctagcctccaagagtgggaagaaattaaagcaagataggctattaagtgcagagggagagaaaatgcctccaacatgtgaggaagtaatgagagaaatcatagaattttaaggccatgatttaaggccatcatggccttaatcttccgcttcctcgctcactgactcgctgcgctcggtcgttcggctgcggcgagcggtatcagctcactcaaaggcggtaatacggttatccacagaatcaggggataacgcaggaaagaacatgtgagcaaaaggccagcaaaaggccaggaaccgtaaaaaggccgcgttgctggcgtttttccataggctccgcccccctgacgagcatcacaaaaatcgacgctcaagtcagaggtggcgaaacccgacaggactataaagataccaggcgtttccccctggaagctccctcgtgcgctctcctgttccgaccctgccgcttaccggatacctgtccgcctttctcccttcgggaagcgtggcgctttctcatagctcacgctgtaggtatctcagttcggtgtaggtcgttcgctccaagctgggctgtgtgcacgaaccccccgttcagcccgaccgctgcgccttatccggtaactatcgtcttgagtccaacccggtaagacacgacttatcgccactggcagcagccactggtaacaggattagcagagcgaggtatgtaggcggtgctacagagttcttgaagtggtggcctaactacggctacactagaagaacagtatttggtatctgcgctctgctgaagccagttaccttcggaaaaagagttggtagctcttgatccggcaaacaaaccaccgctggtagcggtggtttttttgtttgcaagcagcagattacgcgcagaaaaaaaggatctcaagaagatcctttgatcttttctacggggtctgacgctcagtggaacgaaaactcacgttaagggattttggtcatgagattatcaaaaaggatcttcacctagatccttttaaattaaaaatgaagttttaaatcaatctaaagtatatatgagtaaacttggtctgacagttaccaatgcttaatcagtgaggcacctatctcagcgatctgtctatttcgttcatccatagttgcctgactcggggggggggggcgctgaggtctgcctcgtgaagaaggtgttgctgactcataccaggcctgaatcgccccatcatccagccagaaagtgagggagccacggttgatgagagctttgttgtaggtggaccagttggtgattttgaacttttgctttgccacggaacggtctgcgttgtcgggaagatgcgtgatctgatccttcaactcagcaaaagttcgatttattcaacaaagccgccgtcccgtcaagtcagcgtaatgctctgccagtgttacaaccaattaaccaattctgattagaaaaactcatcgagcatcaaatgaaactgcaatttattcatatcaggattatcaataccatatttttgaaaaagccgtttctgtaatgaaggagaaaactcaccgaggcagttccataggatggcaagatcctggtatcggtctgcgattccgactcgtccaacatcaatacaacctattaatttcccctcgtcaaaaataaggttatcaagtgagaaatcaccatgagtgacgactgaatccggtgagaatggcaaaagcttatgcatttctttccagacttgttcaacaggccagccattacgctcgtcatcaaaatcactcgcatcaaccaaaccgttattcattcgtgattgcgcctgagcgagacgaaatacgcgatcgctgttaaaaggacaattacaaacaggaatcgaatgcaaccggcgcaggaacactgccagcgcatcaacaatattttcacctgaatcaggatattcttctaatacctggaatgctgttttcccggggatcgcagtggtgagtaaccatgcatcatcaggagtacggataaaatgcttgatggtcggaagaggcataaattccgtcagccagtttagtctgaccatctcatctgtaacatcattggcaacgctacctttgccatgtttcagaaacaactctggcgcatcgggcttcccatacaatcgatagattgtcgcacctgattgcccgacattatcgcgagcccatttatacccatataaatcagcatccatgttggaatttaatcgcggcctcgagcaagacgtttcccgttgaatatggctcataacaccccttgtattactgtttatgtaagcagacagttttattgttcatgatgatatatttttatcttgtgcaatgtaacatcagagattttgagacacaacgtggctttccccccccccccattattgaagcatttatcagggttattgtctcatgagcggatacatatttgaatgtatttagaaaaataaacaaataggggttccgcgcacatttccccgaaaagtgccacctgacgtctaagaaaccattattatcatgacattaacctataaaaataggcgtatcacgaggccctttcgtc

SEQ ID NO: 107 - DNA, 6150 bp, Artificial Sequence
  Plasmid DNA: 54563
tcgcgcgtttcggtgatgacggtgaaaacctctgacacatgcagctcccggagacggtcacagcttgtctgtaagcggatgccgggagcagacaagcccgtcagggcgcgtcagcgggtgttggcgggtgtcggggctggcttaactatgcggcatcagagcagattgtactgagagtgcaccatatgcggtgtgaaataccgcacagatgcgtaaggagaaaataccgcatcagattggctattggccattgcatacgttgtatccatatcataatatgtacatttatattggctcatgtccaacattaccgccatgttgacattgattattgactagttattaatagtaatcaattacgggaacttccatagcccatatatggagttccgcgttacataacttacgggaatttccaaacctggctgaccgcccaacgacccccgcccattgacgtcaataatgacgtatgttcccatagtaacgccaatagggaacttccattgacgtcaatgggtggagtatttacggtaaactgcccacttgggaatttccaagtgtatcatatgccaagtacgccccctattgacgtcaatgacgggaacttccataagcttgcattatgcccagtacatgaccttatgggaatttcctacttggcagtacatctacgtattagtcatcgctattaccatggtgatgcggttttggcagtacatcaatgggcgtggatagcggtttgactcacgggaacttccaagtctccaccccattgacgtcaatgggagtttgttttgactcaccaaaatcaacgggaattcccaaaatgtcgtaacaactccgccccattgacgcaaatgggcggtaggcgtgtacggtgggaggtctatataagcagagctcgtttagtgaaccgtcagatcgcctggagacgccatccacgctgttttgacctccatagaagacaccgggaccgatccagcctccatcggctcgcatctctccttcacgcgcccgccgccctacctgaggccgccatccacgccggttgagtcgcgttctgccgcctcccgcctgtggtgcctcctgaactgcgtccgccgtctaggtaagtttaaagctcaggtcgagaccgggcctttgtccggcgctcccttggagcctacctagactcagccggctctccacgctttgcctgaccctgcttgctcaactctagttaacggtggagggcagtgtagtctgagcagtactcgttgctgccgcgcgcgccaccagacataatagctgacagactaacagactgttcctttccatgggtcttttctgcagtcaccgtcgtcgacacgtgtgatcagatatcgcggccgctctagagatatcgccaccatggagaagattgtgctgctgttcgccattgtgagcctggtgaagagcgatcagatctgtattggctaccacgccaacaattctacagagcaggtggacaccatcatggagaaaaacgtgacagtgacacacgctcaggacatcctggagaaaacccacaatggcaagctgtgtgatctggatggagtgaagcctctgatcctgagagattgttctgtggctggatggctgctgggaaaccctatgtgtgacgagttcatcaatgtgcctgagtggagctatatcgtggagaaggccaaccctgtgaatgatctgtgttaccccggcgacttcaatgattacgaggagctgaagcacctgctgtccagaatcaaccacttcgagaagatccagatcatccctaagtctagctggtctagccatgaagcttctctgggagtgtctagcgcttgtccctatcagagaaagagcagcttcttcagaaatgtggtgtggctgatcaagaagaacagcacctaccccacaatcaagcggagctacaacaacaccaaccaggaagatctgctggtcctgtggggaattcaccatcctaatgatgccgccgagcagacaaagctgtaccagaaccccaccacatatatctctgtgggcaccagcacactgaatcagagactggtgcctagaatcgccacaagatccaaggtgaacggccagtctggcagaatggagttcttctggaccatcctgaagccaaacgacgccatcaacttcgagagcaacggcaatttcatcgcccctgagtacgcctataagatcgtgaagaagggcgatagcaccatcatgaagagcgagctggagtacggcaactgtaataccaagtgccagacacctatgggcgccatcaatagctctatgcccttccacaatatccaccctctgacaatcggcgagtgtcctaagtacgtgaagagcaacagactggtgctggctacaggcctgagaaatagccctcagagagagacaagaggactgtttggagccatcgccggattcattgaagggggatggcagggaatggtcgatggctggtatggctatcaccacagcaatgagcagggatctggatatgccgccgataaggagtctacacagaaggccatcgacggcgtcacaaacaaggtgaacagcatcatcgacaagatgaacacccagtttgaggctgtgggcagagagttcaacaacctggagcggagaatcgagaacctgaacaagaagatggaggacggctttctggatgtgtggacctataatgccgaactgctggtgctgatggagaacgagagaaccctggatttccacgacagcaacgtgaagaacctgtacgacaaagtgagactgcagctgagagataatgccaaggaactgggcaatggctgcttcgagttctaccacaagtgtgacaacgagtgtatggagtctgtgagaaacggcacctacgattaccctcagtactctgaggaagccagactgaagcgcgaggagatctctggcgtgaagctggagagcatcggcatctatcagatctctggaaggctggtgccaagaggatctcctggcagcggatatattcctgaggcccctagagatggacaggcctatgtgagaaaggatggcgaatgggtgctgctgtctacatttctgggacaccaccaccatcaccattgatgaacacgtgggatccagatctgctgtgccttctagttgccagccatctgttgtttgcccctcccccgtgccttccttgaccctggaaggtgccactcccactgtcctttcctaataaaatgaggaaattgcatcgcattgtctgagtaggtgtcattctattctggggggtggggtggggcaggacagcaagggggaggattgggaagacaatagcaggcatgctggggatgcggtgggctctatgggtacccaggtgctgaagaattgacccggttcctcctgggccagaaagaagcaggcacatccccttctctgtgacacaccctgtccacgcccctggttcttagttccagccccactcataggacactcatagctcaggagggctccgccttcaatcccacccgctaaagtacttggagcggtctctccctccctcatcagcccaccaaaccaaacctagcctccaagagtgggaagaaattaaagcaagataggctattaagtgcagagggagagaaaatgcctccaacatgtgaggaagtaatgagagaaatcatagaattttaaggccatgatttaaggccatcatggccttaatcttccgcttcctcgctcactgactcgctgcgctcggtcgttcggctgcggcgagcggtatcagctcactcaaaggcggtaatacggttatccacagaatcaggggataacgcaggaaagaacatgtgagcaaaaggccagcaaaaggccaggaaccgtaaaaaggccgcgttgctggcgtttttccataggctccgcccccctgacgagcatcacaaaaatcgacgctcaagtcagaggtggcgaaacccgacaggactataaagataccaggcgtttccccctggaagctccctcgtgcgctctcctgttccgaccctgccgcttaccggatacctgtccgcctttctcccttcgggaagcgtggcgctttctcatagctcacgctgtaggtatctcagttcggtgtaggtcgttcgctccaagctgggctgtgtgcacgaaccccccgttcagcccgaccgctgcgccttatccggtaactatcgtcttgagtccaacccggtaagacacgacttatcgccactggcagcagccactggtaacaggattagcagagcgaggtatgtaggcggtgctacagagttcttgaagtggtggcctaactacggctacactagaagaacagtatttggtatctgcgctctgctgaagccagttaccttcggaaaaagagttggtagctcttgatccggcaaacaaaccaccgctggtagcggtggtttttttgtttgcaagcagcagattacgcgcagaaaaaaaggatctcaagaagatcctttgatcttttctacggggtctgacgctcagtggaacgaaaactcacgttaagggattttggtcatgagattatcaaaaaggatcttcacctagatccttttaaattaaaaatgaagttttaaatcaatctaaagtatatatgagtaaacttggtctgacagttaccaatgcttaatcagtgaggcacctatctcagcgatctgtctatttcgttcatccatagttgcctgactcggggggggggggcgctgaggtctgcctcgtgaagaaggtgttgctgactcataccaggcctgaatcgccccatcatccagccagaaagtgagggagccacggttgatgagagctttgttgtaggtggaccagttggtgattttgaacttttgctttgccacggaacggtctgcgttgtcgggaagatgcgtgatctgatccttcaactcagcaaaagttcgatttattcaacaaagccgccgtcccgtcaagtcagcgtaatgctctgccagtgttacaaccaattaaccaattctgattagaaaaactcatcgagcatcaaatgaaactgcaatttattcatatcaggattatcaataccatatttttgaaaaagccgtttctgtaatgaaggagaaaactcaccgaggcagttccataggatggcaagatcctggtatcggtctgcgattccgactcgtccaacatcaatacaacctattaatttcccctcgtcaaaaataaggttatcaagtgagaaatcaccatgagtgacgactgaatccggtgagaatggcaaaagcttatgcatttctttccagacttgttcaacaggccagccattacgctcgtcatcaaaatcactcgcatcaaccaaaccgttattcattcgtgattgcgcctgagcgagacgaaatacgcgatcgctgttaaaaggacaattacaaacaggaatcgaatgcaaccggcgcaggaacactgccagcgcatcaacaatattttcacctgaatcaggatattcttctaatacctggaatgctgttttcccggggatcgcagtggtgagtaaccatgcatcatcaggagtacggataaaatgcttgatggtcggaagaggcataaattccgtcagccagtttagtctgaccatctcatctgtaacatcattggcaacgctacctttgccatgtttcagaaacaactctggcgcatcgggcttcccatacaatcgatagattgtcgcacctgattgcccgacattatcgcgagcccatttatacccatataaatcagcatccatgttggaatttaatcgcggcctcgagcaagacgtttcccgttgaatatggctcataacaccccttgtattactgtttatgtaagcagacagttttattgttcatgatgatatatttttatcttgtgcaatgtaacatcagagattttgagacacaacgtggctttccccccccccccattattgaagcatttatcagggttattgtctcatgagcggatacatatttgaatgtatttagaaaaataaacaaataggggttccgcgcacatttccccgaaaagtgccacctgacgtctaagaaaccattattatcatgacattaacctataaaaataggcgtatcacgaggccctttcgtc

SEQ ID NO: 108 - DNA, 6111 bp, Artificial Sequence
  Plasmid DNA: 54564
tcgcgcgtttcggtgatgacggtgaaaacctctgacacatgcagctcccggagacggtcacagcttgtctgtaagcggatgccgggagcagacaagcccgtcagggcgcgtcagcgggtgttggcgggtgtcggggctggcttaactatgcggcatcagagcagattgtactgagagtgcaccatatgcggtgtgaaataccgcacagatgcgtaaggagaaaataccgcatcagattggctattggccattgcatacgttgtatccatatcataatatgtacatttatattggctcatgtccaacattaccgccatgttgacattgattattgactagttattaatagtaatcaattacgggaacttccatagcccatatatggagttccgcgttacataacttacgggaatttccaaacctggctgaccgcccaacgacccccgcccattgacgtcaataatgacgtatgttcccatagtaacgccaatagggaacttccattgacgtcaatgggtggagtatttacggtaaactgcccacttgggaatttccaagtgtatcatatgccaagtacgccccctattgacgtcaatgacgggaacttccataagcttgcattatgcccagtacatgaccttatgggaatttcctacttggcagtacatctacgtattagtcatcgctattaccatggtgatgcggttttggcagtacatcaatgggcgtggatagcggtttgactcacgggaacttccaagtctccaccccattgacgtcaatgggagtttgttttgactcaccaaaatcaacgggaattcccaaaatgtcgtaacaactccgccccattgacgcaaatgggcggtaggcgtgtacggtgggaggtctatataagcagagctcgtttagtgaaccgtcagatcgcctggagacgccatccacgctgttttgacctccatagaagacaccgggaccgatccagcctccatcggctcgcatctctccttcacgcgcccgccgccctacctgaggccgccatccacgccggttgagtcgcgttctgccgcctcccgcctgtggtgcctcctgaactgcgtccgccgtctaggtaagtttaaagctcaggtcgagaccgggcctttgtccggcgctcccttggagcctacctagactcagccggctctccacgctttgcctgaccctgcttgctcaactctagttaacggtggagggcagtgtagtctgagcagtactcgttgctgccgcgcgcgccaccagacataatagctgacagactaacagactgttcctttccatgggtcttttctgcagtcaccgtcgtcgacacgtgtgatcagatatcgcggccgctctagagatatcgccaccatggagaagattgtgctgctgttcgccattgtgagcctggtgaagagcgatcagatctgtattggctaccacgccaacaattctacagagcaggtggacaccatcatggagaaaaacgtgacagtgacacacgctcaggacatcctggagaaaacccacaatggcaagctgtgtgatctggatggagtgaagcctctgatcctgagagattgttctgtggctggatggctgctgggaaaccctatgtgtgacgagttcatcaatgtgcctgagtggagctatatcgtggagaaggccaaccctgtgaatgatctgtgttaccccggcgacttcaatgattacgaggagctgaagcacctgctgtccagaatcaaccacttcgagaagatccagatcatccctaagtctagctggtctagccatgaagcttctctgggagtgtctagcgcttgtccctatcagagaaagagcagcttcttcagaaatgtggtgtggctgatcaagaagaacagcacctaccccacaatcaagcggagctacaacaacaccaaccaggaagatctgctggtcctgtggggaattcaccatcctaatgatgccgccgagcagacaaagctgtaccagaaccccaccacatatatctctgtgggcaccagcacactgaatcagagactggtgcctagaatcgccacaagatccaaggtgaacggccagtctggcagaatggagttcttctggaccatcctgaagccaaacgacgccatcaacttcgagagcaacggcaatttcatcgcccctgagtacgcctataagatcgtgaagaagggcgatagcaccatcatgaagagcgagctggagtacggcaactgtaataccaagtgccagacacctatgggcgccatcaatagctctatgcccttccacaatatccaccctctgacaatcggcgagtgtcctaagtacgtgaagagcaacagactggtgctggctacaggcctgagaaatagccctcagagagagacaagaggactgtttggagccatcgccggattcattgaagggggatggcagggaatggtcgatggctggtatggctatcaccacagcaatgagcagggatctggatatgccgccgataaggagtctacacagaaggccatcgacggcgtcacaaacaaggtgaacagcatcatcgacaagatgaacacccagtttgaggctgtgggcagagagttcaacaacctggagcggagaatcgagaacctgaacaagaagatggaggacggctttctggatgtgtggacctataatgccgaactgctggtgctgatggagaacgagagaaccctggatttccacgacagcaacgtgaagaacctgtacgacaaagtgagactgcagctgagagataatgccaaggaactgggcaatggctgcttcgagttctaccacaagtgtgacaacgagtgtatggagtctgtgagaaacggcacctacgattaccctcagtactctgaggaagccagactgaagcgcgaggagatctctggaaggctggtgccaagaggatctcctggcagcggatatattcctgaggcccctagagatggacaggcctatgtgagaaaggatggcgaatgggtgctgctgtctacatttctgggacaccaccaccatcaccattgatgaacacgtgggatccagatctgctgtgccttctagttgccagccatctgttgtttgcccctcccccgtgccttccttgaccctggaaggtgccactcccactgtcctttcctaataaaatgaggaaattgcatcgcattgtctgagtaggtgtcattctattctggggggtggggtggggcaggacagcaagggggaggattgggaagacaatagcaggcatgctggggatgcggtgggctctatgggtacccaggtgctgaagaattgacccggttcctcctgggccagaaagaagcaggcacatccccttctctgtgacacaccctgtccacgcccctggttcttagttccagccccactcataggacactcatagctcaggagggctccgccttcaatcccacccgctaaagtacttggagcggtctctccctccctcatcagcccaccaaaccaaacctagcctccaagagtgggaagaaattaaagcaagataggctattaagtgcagagggagagaaaatgcctccaacatgtgaggaagtaatgagagaaatcatagaattttaaggccatgatttaaggccatcatggccttaatcttccgcttcctcgctcactgactcgctgcgctcggtcgttcggctgcggcgagcggtatcagctcactcaaaggcggtaatacggttatccacagaatcaggggataacgcaggaaagaacatgtgagcaaaaggccagcaaaaggccaggaaccgtaaaaaggccgcgttgctggcgtttttccataggctccgcccccctgacgagcatcacaaaaatcgacgctcaagtcagaggtggcgaaacccgacaggactataaagataccaggcgtttccccctggaagctccctcgtgcgctctcctgttccgaccctgccgcttaccggatacctgtccgcctttctcccttcgggaagcgtggcgctttctcatagctcacgctgtaggtatctcagttcggtgtaggtcgttcgctccaagctgggctgtgtgcacgaaccccccgttcagcccgaccgctgcgccttatccggtaactatcgtcttgagtccaacccggtaagacacgacttatcgccactggcagcagccactggtaacaggattagcagagcgaggtatgtaggcggtgctacagagttcttgaagtggtggcctaactacggctacactagaagaacagtatttggtatctgcgctctgctgaagccagttaccttcggaaaaagagttggtagctcttgatccggcaaacaaaccaccgctggtagcggtggtttttttgtttgcaagcagcagattacgcgcagaaaaaaaggatctcaagaagatcctttgatcttttctacggggtctgacgctcagtggaacgaaaactcacgttaagggattttggtcatgagattatcaaaaaggatcttcacctagatccttttaaattaaaaatgaagttttaaatcaatctaaagtatatatgagtaaacttggtctgacagttaccaatgcttaatcagtgaggcacctatctcagcgatctgtctatttcgttcatccatagttgcctgactcggggggggggggcgctgaggtctgcctcgtgaagaaggtgttgctgactcataccaggcctgaatcgccccatcatccagccagaaagtgagggagccacggttgatgagagctttgttgtaggtggaccagttggtgattttgaacttttgctttgccacggaacggtctgcgttgtcgggaagatgcgtgatctgatccttcaactcagcaaaagttcgatttattcaacaaagccgccgtcccgtcaagtcagcgtaatgctctgccagtgttacaaccaattaaccaattctgattagaaaaactcatcgagcatcaaatgaaactgcaatttattcatatcaggattatcaataccatatttttgaaaaagccgtttctgtaatgaaggagaaaactcaccgaggcagttccataggatggcaagatcctggtatcggtctgcgattccgactcgtccaacatcaatacaacctattaatttcccctcgtcaaaaataaggttatcaagtgagaaatcaccatgagtgacgactgaatccggtgagaatggcaaaagcttatgcatttctttccagacttgttcaacaggccagccattacgctcgtcatcaaaatcactcgcatcaaccaaaccgttattcattcgtgattgcgcctgagcgagacgaaatacgcgatcgctgttaaaaggacaattacaaacaggaatcgaatgcaaccggcgcaggaacactgccagcgcatcaacaatattttcacctgaatcaggatattcttctaatacctggaatgctgttttcccggggatcgcagtggtgagtaaccatgcatcatcaggagtacggataaaatgcttgatggtcggaagaggcataaattccgtcagccagtttagtctgaccatctcatctgtaacatcattggcaacgctacctttgccatgtttcagaaacaactctggcgcatcgggcttcccatacaatcgatagattgtcgcacctgattgcccgacattatcgcgagcccatttatacccatataaatcagcatccatgttggaatttaatcgcggcctcgagcaagacgtttcccgttgaatatggctcataacaccccttgtattactgtttatgtaagcagacagttttattgttcatgatgatatatttttatcttgtgcaatgtaacatcagagattttgagacacaacgtggctttccccccccccccattattgaagcatttatcagggttattgtctcatgagcggatacatatttgaatgtatttagaaaaataaacaaataggggttccgcgcacatttccccgaaaagtgccacctgacgtctaagaaaccattattatcatgacattaacctataaaaataggcgtatcacgaggccctttcgtc

SEQ ID NO: 109 - DNA, 6180 bp, Artificial Sequence
  Plasmid DNA: 54565
tcgcgcgtttcggtgatgacggtgaaaacctctgacacatgcagctcccggagacggtcacagcttgtctgtaagcggatgccgggagcagacaagcccgtcagggcgcgtcagcgggtgttggcgggtgtcggggctggcttaactatgcggcatcagagcagattgtactgagagtgcaccatatgcggtgtgaaataccgcacagatgcgtaaggagaaaataccgcatcagattggctattggccattgcatacgttgtatccatatcataatatgtacatttatattggctcatgtccaacattaccgccatgttgacattgattattgactagttattaatagtaatcaattacgggaacttccatagcccatatatggagttccgcgttacataacttacgggaatttccaaacctggctgaccgcccaacgacccccgcccattgacgtcaataatgacgtatgttcccatagtaacgccaatagggaacttccattgacgtcaatgggtggagtatttacggtaaactgcccacttgggaatttccaagtgtatcatatgccaagtacgccccctattgacgtcaatgacgggaacttccataagcttgcattatgcccagtacatgaccttatgggaatttcctacttggcagtacatctacgtattagtcatcgctattaccatggtgatgcggttttggcagtacatcaatgggcgtggatagcggtttgactcacgggaacttccaagtctccaccccattgacgtcaatgggagtttgttttgactcaccaaaatcaacgggaattcccaaaatgtcgtaacaactccgccccattgacgcaaatgggcggtaggcgtgtacggtgggaggtctatataagcagagctcgtttagtgaaccgtcagatcgcctggagacgccatccacgctgttttgacctccatagaagacaccgggaccgatccagcctccatcggctcgcatctctccttcacgcgcccgccgccctacctgaggccgccatccacgccggttgagtcgcgttctgccgcctcccgcctgtggtgcctcctgaactgcgtccgccgtctaggtaagtttaaagctcaggtcgagaccgggcctttgtccggcgctcccttggagcctacctagactcagccggctctccacgctttgcctgaccctgcttgctcaactctagttaacggtggagggcagtgtagtctgagcagtactcgttgctgccgcgcgcgccaccagacataatagctgacagactaacagactgttcctttccatgggtcttttctgcagtcaccgtcgtcgacacgtgtgatcagatatcgcggccgctctagagatatcgccaccatggagaagattgtgctgctgttcgccattgtgagcctggtgaagagcgatcagatctgtattggctaccacgccaacaattctacagagcaggtggacaccatcatggagaaaaacgtgacagtgacacacgctcaggacatcctggagaaaacccacaatggcaagctgtgtgatctggatggagtgaagcctctgatcctgagagattgttctgtggctggatggctgctgggaaaccctatgtgtgacgagttcatcaatgtgcctgagtggagctatatcgtggagaaggccaaccctgtgaatgatctgtgttaccccggcgacttcaatgattacgaggagctgaagcacctgctgtccagaatcaaccacttcgagaagatccagatcatccctaagtctagctggtctagccatgaagcttctctgggagtgtctagcgcttgtccctatcagagaaagagcagcttcttcagaaatgtggtgtggctgatcaagaagaacagcacctaccccacaatcaagcggagctacaacaacaccaaccaggaagatctgctggtcctgtggggaattcaccatcctaatgatgccgccgagcagacaaagctgtaccagaaccccaccacatatatctctgtgggcaccagcacactgaatcagagactggtgcctagaatcgccacaagatccaaggtgaacggccagtctggcagaatggagttcttctggaccatcctgaagccaaacgacgccatcaacttcgagagcaacggcaatttcatcgcccctgagtacgcctataagatcgtgaagaagggcgatagcaccatcatgaagagcgagctggagtacggcaactgtaataccaagtgccagacacctatgggcgccatcaatagctctatgcccttccacaatatccaccctctgacaatcggcgagtgtcctaagtacgtgaagagcaacagactggtgctggctacaggcctgagaaatagccctcagagagagacaagaggactgtttggagccatcgccggattcattgaagggggatggcagggaatggtcgatggctggtatggctatcaccacagcaatgagcagggatctggatatgccgccgataaggagtctacacagaaggccatcgacggcgtcacaaacaaggtgaacagcatcatcgacaagatgaacacccagtttgaggctgtgggcagagagttcaacaacctggagcggagaatcgagaacctgaacaagaagatggaggacggctttctggatgtgtggacctataatgccgaactgctggtgctgatggagaacgagagaaccctggatttccacgacagcaacgtgaagaacctgtacgacaaagtgagactgcagctgagagataatgccaaggaactgggcaatggctgcttcgagttctaccacaagtgtgacaacgagtgtatggagtctgtgagaaacggcacctacgattaccctcagtactctgaggaagccagactgaagcgcgaggagatctctggcgtgaagctggagagcatcggcatctatcagatcggaggaggatctggaggaggaagtggctcttctggaaggctggtgccaagaggatctcctggcagcggatatattcctgaggcccctagagatggacaggcctatgtgagaaaggatggcgaatgggtgctgctgtctacatttctgggacaccaccaccatcaccattgatgaacacgtgggatccagatctgctgtgccttctagttgccagccatctgttgtttgcccctcccccgtgccttccttgaccctggaaggtgccactcccactgtcctttcctaataaaatgaggaaattgcatcgcattgtctgagtaggtgtcattctattctggggggtggggtggggcaggacagcaagggggaggattgggaagacaatagcaggcatgctggggatgcggtgggctctatgggtacccaggtgctgaagaattgacccggttcctcctgggccagaaagaagcaggcacatccccttctctgtgacacaccctgtccacgcccctggttcttagttccagccccactcataggacactcatagctcaggagggctccgccttcaatcccacccgctaaagtacttggagcggtctctccctccctcatcagcccaccaaaccaaacctagcctccaagagtgggaagaaattaaagcaagataggctattaagtgcagagggagagaaaatgcctccaacatgtgaggaagtaatgagagaaatcatagaattttaaggccatgatttaaggccatcatggccttaatcttccgcttcctcgctcactgactcgctgcgctcggtcgttcggctgcggcgagcggtatcagctcactcaaaggcggtaatacggttatccacagaatcaggggataacgcaggaaagaacatgtgagcaaaaggccagcaaaaggccaggaaccgtaaaaaggccgcgttgctggcgtttttccataggctccgcccccctgacgagcatcacaaaaatcgacgctcaagtcagaggtggcgaaacccgacaggactataaagataccaggcgtttccccctggaagctccctcgtgcgctctcctgttccgaccctgccgcttaccggatacctgtccgcctttctcccttcgggaagcgtggcgctttctcatagctcacgctgtaggtatctcagttcggtgtaggtcgttcgctccaagctgggctgtgtgcacgaaccccccgttcagcccgaccgctgcgccttatccggtaactatcgtcttgagtccaacccggtaagacacgacttatcgccactggcagcagccactggtaacaggattagcagagcgaggtatgtaggcggtgctacagagttcttgaagtggtggcctaactacggctacactagaagaacagtatttggtatctgcgctctgctgaagccagttaccttcggaaaaagagttggtagctcttgatccggcaaacaaaccaccgctggtagcggtggtttttttgtttgcaagcagcagattacgcgcagaaaaaaaggatctcaagaagatcctttgatcttttctacggggtctgacgctcagtggaacgaaaactcacgttaagggattttggtcatgagattatcaaaaaggatcttcacctagatccttttaaattaaaaatgaagttttaaatcaatctaaagtatatatgagtaaacttggtctgacagttaccaatgcttaatcagtgaggcacctatctcagcgatctgtctatttcgttcatccatagttgcctgactcggggggggggggcgctgaggtctgcctcgtgaagaaggtgttgctgactcataccaggcctgaatcgccccatcatccagccagaaagtgagggagccacggttgatgagagctttgttgtaggtggaccagttggtgattttgaacttttgctttgccacggaacggtctgcgttgtcgggaagatgcgtgatctgatccttcaactcagcaaaagttcgatttattcaacaaagccgccgtcccgtcaagtcagcgtaatgctctgccagtgttacaaccaattaaccaattctgattagaaaaactcatcgagcatcaaatgaaactgcaatttattcatatcaggattatcaataccatatttttgaaaaagccgtttctgtaatgaaggagaaaactcaccgaggcagttccataggatggcaagatcctggtatcggtctgcgattccgactcgtccaacatcaatacaacctattaatttcccctcgtcaaaaataaggttatcaagtgagaaatcaccatgagtgacgactgaatccggtgagaatggcaaaagcttatgcatttctttccagacttgttcaacaggccagccattacgctcgtcatcaaaatcactcgcatcaaccaaaccgttattcattcgtgattgcgcctgagcgagacgaaatacgcgatcgctgttaaaaggacaattacaaacaggaatcgaatgcaaccggcgcaggaacactgccagcgcatcaacaatattttcacctgaatcaggatattcttctaatacctggaatgctgttttcccggggatcgcagtggtgagtaaccatgcatcatcaggagtacggataaaatgcttgatggtcggaagaggcataaattccgtcagccagtttagtctgaccatctcatctgtaacatcattggcaacgctacctttgccatgtttcagaaacaactctggcgcatcgggcttcccatacaatcgatagattgtcgcacctgattgcccgacattatcgcgagcccatttatacccatataaatcagcatccatgttggaatttaatcgcggcctcgagcaagacgtttcccgttgaatatggctcataacaccccttgtattactgtttatgtaagcagacagttttattgttcatgatgatatatttttatcttgtgcaatgtaacatcagagattttgagacacaacgtggctttccccccccccccattattgaagcatttatcagggttattgtctcatgagcggatacatatttgaatgtatttagaaaaataaacaaataggggttccgcgcacatttccccgaaaagtgccacctgacgtctaagaaaccattattatcatgacattaacctataaaaataggcgtatcacgaggccctttcgtc

SEQ ID NO: 110 - DNA, 6135 bp, Artificial Sequence
  Plasmid DNA: 54566
tcgcgcgtttcggtgatgacggtgaaaacctctgacacatgcagctcccggagacggtcacagcttgtctgtaagcggatgccgggagcagacaagcccgtcagggcgcgtcagcgggtgttggcgggtgtcggggctggcttaactatgcggcatcagagcagattgtactgagagtgcaccatatgcggtgtgaaataccgcacagatgcgtaaggagaaaataccgcatcagattggctattggccattgcatacgttgtatccatatcataatatgtacatttatattggctcatgtccaacattaccgccatgttgacattgattattgactagttattaatagtaatcaattacgggaacttccatagcccatatatggagttccgcgttacataacttacgggaatttccaaacctggctgaccgcccaacgacccccgcccattgacgtcaataatgacgtatgttcccatagtaacgccaatagggaacttccattgacgtcaatgggtggagtatttacggtaaactgcccacttgggaatttccaagtgtatcatatgccaagtacgccccctattgacgtcaatgacgggaacttccataagcttgcattatgcccagtacatgaccttatgggaatttcctacttggcagtacatctacgtattagtcatcgctattaccatggtgatgcggttttggcagtacatcaatgggcgtggatagcggtttgactcacgggaacttccaagtctccaccccattgacgtcaatgggagtttgttttgactcaccaaaatcaacgggaattcccaaaatgtcgtaacaactccgccccattgacgcaaatgggcggtaggcgtgtacggtgggaggtctatataagcagagctcgtttagtgaaccgtcagatcgcctggagacgccatccacgctgttttgacctccatagaagacaccgggaccgatccagcctccatcggctcgcatctctccttcacgcgcccgccgccctacctgaggccgccatccacgccggttgagtcgcgttctgccgcctcccgcctgtggtgcctcctgaactgcgtccgccgtctaggtaagtttaaagctcaggtcgagaccgggcctttgtccggcgctcccttggagcctacctagactcagccggctctccacgctttgcctgaccctgcttgctcaactctagttaacggtggagggcagtgtagtctgagcagtactcgttgctgccgcgcgcgccaccagacataatagctgacagactaacagactgttcctttccatgggtcttttctgcagtcaccgtcgtcgacacgtgtgatcagatatcgcggccgctctagagatatcgccaccatggagaagattgtgctgctgttcgccattgtgagcctggtgaagagcgatcagatctgtattggctaccacgccaacaattctacagagcaggtggacaccatcatggagaaaaacgtgacagtgacacacgctcaggacatcctggagaaaacccacaatggcaagctgtgtgatctggatggagtgaagcctctgatcctgagagattgttctgtggctggatggctgctgggaaaccctatgtgtgacgagttcatcaatgtgcctgagtggagctatatcgtggagaaggccaaccctgtgaatgatctgtgttaccccggcgacttcaatgattacgaggagctgaagcacctgctgtccagaatcaaccacttcgagaagatccagatcatccctaagtctagctggtctagccatgaagcttctctgggagtgtctagcgcttgtccctatcagagaaagagcagcttcttcagaaatgtggtgtggctgatcaagaagaacagcacctaccccacaatcaagcggagctacaacaacaccaaccaggaagatctgctggtcctgtggggaattcaccatcctaatgatgccgccgagcagacaaagctgtaccagaaccccaccacatatatctctgtgggcaccagcacactgaatcagagactggtgcctagaatcgccacaagatccaaggtgaacggccagtctggcagaatggagttcttctggaccatcctgaagccaaacgacgccatcaacttcgagagcaacggcaatttcatcgcccctgagtacgcctataagatcgtgaagaagggcgatagcaccatcatgaagagcgagctggagtacggcaactgtaataccaagtgccagacacctatgggcgccatcaatagctctatgcccttccacaatatccaccctctgacaatcggcgagtgtcctaagtacgtgaagagcaacagactggtgctggctacaggcctgagaaatagccctcagagagagacaagaggactgtttggagccatcgccggattcattgaagggggatggcagggaatggtcgatggctggtatggctatcaccacagcaatgagcagggatctggatatgccgccgataaggagtctacacagaaggccatcgacggcgtcacaaacaaggtgaacagcatcatcgacaagatgaacacccagtttgaggctgtgggcagagagttcaacaacctggagcggagaatcgagaacctgaacaagaagatggaggacggctttctggatgtgtggacctataatgccgaactgctggtgctgatggagaacgagagaaccctggatttccacgacagcaacgtgaagaacctgtacgacaaagtgagactgcagctgagagataatgccaaggaactgggcaatggctgcttcgagttctaccacaagtgtgacaacgagtgtatggagtctgtgagaaacggcacctacgattaccctcagtactctgaggaagccagactgaagcgcgaggagatcggaggaggatctggaggaggaagtggctctaggctggtgccaagaggatctcctggcagcggatatattcctgaggcccctagagatggacaggcctatgtgagaaaggatggcgaatgggtgctgctgtctacatttctgggacaccaccaccatcaccattgatgaacacgtgggatccagatctgctgtgccttctagttgccagccatctgttgtttgcccctcccccgtgccttccttgaccctggaaggtgccactcccactgtcctttcctaataaaatgaggaaattgcatcgcattgtctgagtaggtgtcattctattctggggggtggggtggggcaggacagcaagggggaggattgggaagacaatagcaggcatgctggggatgcggtgggctctatgggtacccaggtgctgaagaattgacccggttcctcctgggccagaaagaagcaggcacatccccttctctgtgacacaccctgtccacgcccctggttcttagttccagccccactcataggacactcatagctcaggagggctccgccttcaatcccacccgctaaagtacttggagcggtctctccctccctcatcagcccaccaaaccaaacctagcctccaagagtgggaagaaattaaagcaagataggctattaagtgcagagggagagaaaatgcctccaacatgtgaggaagtaatgagagaaatcatagaattttaaggccatgatttaaggccatcatggccttaatcttccgcttcctcgctcactgactcgctgcgctcggtcgttcggctgcggcgagcggtatcagctcactcaaaggcggtaatacggttatccacagaatcaggggataacgcaggaaagaacatgtgagcaaaaggccagcaaaaggccaggaaccgtaaaaaggccgcgttgctggcgtttttccataggctccgcccccctgacgagcatcacaaaaatcgacgctcaagtcagaggtggcgaaacccgacaggactataaagataccaggcgtttccccctggaagctccctcgtgcgctctcctgttccgaccctgccgcttaccggatacctgtccgcctttctcccttcgggaagcgtggcgctttctcatagctcacgctgtaggtatctcagttcggtgtaggtcgttcgctccaagctgggctgtgtgcacgaaccccccgttcagcccgaccgctgcgccttatccggtaactatcgtcttgagtccaacccggtaagacacgacttatcgccactggcagcagccactggtaacaggattagcagagcgaggtatgtaggcggtgctacagagttcttgaagtggtggcctaactacggctacactagaagaacagtatttggtatctgcgctctgctgaagccagttaccttcggaaaaagagttggtagctcttgatccggcaaacaaaccaccgctggtagcggtggtttttttgtttgcaagcagcagattacgcgcagaaaaaaaggatctcaagaagatcctttgatcttttctacggggtctgacgctcagtggaacgaaaactcacgttaagggattttggtcatgagattatcaaaaaggatcttcacctagatccttttaaattaaaaatgaagttttaaatcaatctaaagtatatatgagtaaacttggtctgacagttaccaatgcttaatcagtgaggcacctatctcagcgatctgtctatttcgttcatccatagttgcctgactcggggggggggggcgctgaggtctgcctcgtgaagaaggtgttgctgactcataccaggcctgaatcgccccatcatccagccagaaagtgagggagccacggttgatgagagctttgttgtaggtggaccagttggtgattttgaacttttgctttgccacggaacggtctgcgttgtcgggaagatgcgtgatctgatccttcaactcagcaaaagttcgatttattcaacaaagccgccgtcccgtcaagtcagcgtaatgctctgccagtgttacaaccaattaaccaattctgattagaaaaactcatcgagcatcaaatgaaactgcaatttattcatatcaggattatcaataccatatttttgaaaaagccgtttctgtaatgaaggagaaaactcaccgaggcagttccataggatggcaagatcctggtatcggtctgcgattccgactcgtccaacatcaatacaacctattaatttcccctcgtcaaaaataaggttatcaagtgagaaatcaccatgagtgacgactgaatccggtgagaatggcaaaagcttatgcatttctttccagacttgttcaacaggccagccattacgctcgtcatcaaaatcactcgcatcaaccaaaccgttattcattcgtgattgcgcctgagcgagacgaaatacgcgatcgctgttaaaaggacaattacaaacaggaatcgaatgcaaccggcgcaggaacactgccagcgcatcaacaatattttcacctgaatcaggatattcttctaatacctggaatgctgttttcccggggatcgcagtggtgagtaaccatgcatcatcaggagtacggataaaatgcttgatggtcggaagaggcataaattccgtcagccagtttagtctgaccatctcatctgtaacatcattggcaacgctacctttgccatgtttcagaaacaactctggcgcatcgggcttcccatacaatcgatagattgtcgcacctgattgcccgacattatcgcgagcccatttatacccatataaatcagcatccatgttggaatttaatcgcggcctcgagcaagacgtttcccgttgaatatggctcataacaccccttgtattactgtttatgtaagcagacagttttattgttcatgatgatatatttttatcttgtgcaatgtaacatcagagattttgagacacaacgtggctttccccccccccccattattgaagcatttatcagggttattgtctcatgagcggatacatatttgaatgtatttagaaaaataaacaaataggggttccgcgcacatttccccgaaaagtgccacctgacgtctaagaaaccattattatcatgacattaacctataaaaataggcgtatcacgaggccctttcgtc

SEQ ID NO: 111 - DNA, 6120 bp, Artificial Sequence
  Plasmid DNA: 54670
tcgcgcgtttcggtgatgacggtgaaaacctctgacacatgcagctcccggagacggtcacagcttgtctgtaagcggatgccgggagcagacaagcccgtcagggcgcgtcagcgggtgttggcgggtgtcggggctggcttaactatgcggcatcagagcagattgtactgagagtgcaccatatgcggtgtgaaataccgcacagatgcgtaaggagaaaataccgcatcagattggctattggccattgcatacgttgtatccatatcataatatgtacatttatattggctcatgtccaacattaccgccatgttgacattgattattgactagttattaatagtaatcaattacgggaacttccatagcccatatatggagttccgcgttacataacttacgggaatttccaaacctggctgaccgcccaacgacccccgcccattgacgtcaataatgacgtatgttcccatagtaacgccaatagggaacttccattgacgtcaatgggtggagtatttacggtaaactgcccacttgggaatttccaagtgtatcatatgccaagtacgccccctattgacgtcaatgacgggaacttccataagcttgcattatgcccagtacatgaccttatgggaatttcctacttggcagtacatctacgtattagtcatcgctattaccatggtgatgcggttttggcagtacatcaatgggcgtggatagcggtttgactcacgggaacttccaagtctccaccccattgacgtcaatgggagtttgttttgactcaccaaaatcaacgggaattcccaaaatgtcgtaacaactccgccccattgacgcaaatgggcggtaggcgtgtacggtgggaggtctatataagcagagctcgtttagtgaaccgtcagatcgcctggagacgccatccacgctgttttgacctccatagaagacaccgggaccgatccagcctccatcggctcgcatctctccttcacgcgcccgccgccctacctgaggccgccatccacgccggttgagtcgcgttctgccgcctcccgcctgtggtgcctcctgaactgcgtccgccgtctaggtaagtttaaagctcaggtcgagaccgggcctttgtccggcgctcccttggagcctacctagactcagccggctctccacgctttgcctgaccctgcttgctcaactctagttaacggtggagggcagtgtagtctgagcagtactcgttgctgccgcgcgcgccaccagacataatagctgacagactaacagactgttcctttccatgggtcttttctgcagtcaccgtcgtcgacacgtgtgatcagatatcgcggccgctctagagatatcgccaccatgctgtccatcgccatcctgtttctgctgatcgccgagggcagcagccagaattacaccggcaaccccgtgatttgtctgggacaccacgccgtgtctaatggcaccatggtgaaaaccctgaccgacgaccagatcgaagtggtgacagcccaggaactggtcgaatctcagcacctgcctgagctgtgtccttctcccctgagactggtggatggccagacctgtgacatcgtgaatggcgccctgggatctcctggatgtgaccacctgaatggagccgagtgggacgtgttcatcgagagacctaccgccgtggatacctgctaccccttcgacgtgcctgattaccagagcctgaggagcatcctggccaacaacggcaagttcgagttcatcgccgaggagttccagtggaacaccgtgaagcagaatggcaagagcggcgcctgtaaaagggccaacgtgaacgacttcttcaaccggctgaactggctgacaaagagcgatggcaacgcctaccctctgcagaatctgaccaaggtgaacaacggcgactacgccagactgtatatctggggcgtgcaccacccttctaccgataccgagcagaccaacctgtacaagaacaaccccggcagagtgacagtgagcacccagaccagccagacaagcgtggtgcctaacatcggaagcagaccttgggtgaggggactgagcagcaggatcagcttctactggaccatcgtggagcctggcgatctgatcgtgttcaacaccatcggcaacctgattgcccctaggggccactacaagctgaacagccagaagaagagcaccatcctgaataccgccgtgcctatcggctcttgtgtgagcaagtgccacaccgataagggcagcatcagcaccaccaagcccttccagaacatcagccggatcagcatcggcgattgccccaagtatgtgaagcagggcagcctgaaactggccaccggcatgagaaacatcccccagagagagaccagaggactgtttggagccatcgccggattcatcgagaatggctggcagggactgatcgatggctggtacggcttcagacaccagaatgccgagggaacaggaacagccgccgatctgaagtctacacaggccgccatcgaccagatcaacggcaagctgaaccggctgatcgagaagcccaacgagaagtaccaccagatcgagaaggaattcgagcaggtggagggcagaatccaggacctggagaagtacgtggaggacaccaagatcgacctgtggagctacaatgccgaactgctggtggccctggagaatcagcacaccatcgacgtgaccgacagcgagatgaacaagctgttcgagagagtgaggcaccagctgagagagaacgccgaggataagggcaatggctgcttcgagatcttccaccagtgtgacaacagctgtatcgagagcatccggaacggcacctacgatcacgacatctacagggacgaggccatcaacaaccggtttcagatccagggcgtgaagctgatccagggctacaaggacatcatcctgtggttcagcttcagcatcagctgctttctgctcgtcgctctgctgctggcctttattctgtgggcctgccagaacggcaatatccggtgccagatctgtatctgatgaacacgtgggatccagatctgctgtgccttctagttgccagccatctgttgtttgcccctcccccgtgccttccttgaccctggaaggtgccactcccactgtcctttcctaataaaatgaggaaattgcatcgcattgtctgagtaggtgtcattctattctggggggtggggtggggcaggacagcaagggggaggattgggaagacaatagcaggcatgctggggatgcggtgggctctatgggtacccaggtgctgaagaattgacccggttcctcctgggccagaaagaagcaggcacatccccttctctgtgacacaccctgtccacgcccctggttcttagttccagccccactcataggacactcatagctcaggagggctccgccttcaatcccacccgctaaagtacttggagcggtctctccctccctcatcagcccaccaaaccaaacctagcctccaagagtgggaagaaattaaagcaagataggctattaagtgcagagggagagaaaatgcctccaacatgtgaggaagtaatgagagaaatcatagaattttaaggccatgatttaaggccatcatggccttaatcttccgcttcctcgctcactgactcgctgcgctcggtcgttcggctgcggcgagcggtatcagctcactcaaaggcggtaatacggttatccacagaatcaggggataacgcaggaaagaacatgtgagcaaaaggccagcaaaaggccaggaaccgtaaaaaggccgcgttgctggcgtttttccataggctccgcccccctgacgagcatcacaaaaatcgacgctcaagtcagaggtggcgaaacccgacaggactataaagataccaggcgtttccccctggaagctccctcgtgcgctctcctgttccgaccctgccgcttaccggatacctgtccgcctttctcccttcgggaagcgtggcgctttctcatagctcacgctgtaggtatctcagttcggtgtaggtcgttcgctccaagctgggctgtgtgcacgaaccccccgttcagcccgaccgctgcgccttatccggtaactatcgtcttgagtccaacccggtaagacacgacttatcgccactggcagcagccactggtaacaggattagcagagcgaggtatgtaggcggtgctacagagttcttgaagtggtggcctaactacggctacactagaagaacagtatttggtatctgcgctctgctgaagccagttaccttcggaaaaagagttggtagctcttgatccggcaaacaaaccaccgctggtagcggtggtttttttgtttgcaagcagcagattacgcgcagaaaaaaaggatctcaagaagatcctttgatcttttctacggggtctgacgctcagtggaacgaaaactcacgttaagggattttggtcatgagattatcaaaaaggatcttcacctagatccttttaaattaaaaatgaagttttaaatcaatctaaagtatatatgagtaaacttggtctgacagttaccaatgcttaatcagtgaggcacctatctcagcgatctgtctatttcgttcatccatagttgcctgactcggggggggggggcgctgaggtctgcctcgtgaagaaggtgttgctgactcataccaggcctgaatcgccccatcatccagccagaaagtgagggagccacggttgatgagagctttgttgtaggtggaccagttggtgattttgaacttttgctttgccacggaacggtctgcgttgtcgggaagatgcgtgatctgatccttcaactcagcaaaagttcgatttattcaacaaagccgccgtcccgtcaagtcagcgtaatgctctgccagtgttacaaccaattaaccaattctgattagaaaaactcatcgagcatcaaatgaaactgcaatttattcatatcaggattatcaataccatatttttgaaaaagccgtttctgtaatgaaggagaaaactcaccgaggcagttccataggatggcaagatcctggtatcggtctgcgattccgactcgtccaacatcaatacaacctattaatttcccctcgtcaaaaataaggttatcaagtgagaaatcaccatgagtgacgactgaatccggtgagaatggcaaaagcttatgcatttctttccagacttgttcaacaggccagccattacgctcgtcatcaaaatcactcgcatcaaccaaaccgttattcattcgtgattgcgcctgagcgagacgaaatacgcgatcgctgttaaaaggacaattacaaacaggaatcgaatgcaaccggcgcaggaacactgccagcgcatcaacaatattttcacctgaatcaggatattcttctaatacctggaatgctgttttcccggggatcgcagtggtgagtaaccatgcatcatcaggagtacggataaaatgcttgatggtcggaagaggcataaattccgtcagccagtttagtctgaccatctcatctgtaacatcattggcaacgctacctttgccatgtttcagaaacaactctggcgcatcgggcttcccatacaatcgatagattgtcgcacctgattgcccgacattatcgcgagcccatttatacccatataaatcagcatccatgttggaatttaatcgcggcctcgagcaagacgtttcccgttgaatatggctcataacaccccttgtattactgtttatgtaagcagacagttttattgttcatgatgatatatttttatcttgtgcaatgtaacatcagagattttgagacacaacgtggctttccccccccccccattattgaagcatttatcagggttattgtctcatgagcggatacatatttgaatgtatttagaaaaataaacaaataggggttccgcgcacatttccccgaaaagtgccacctgacgtctaagaaaccattattatcatgacattaacctataaaaataggcgtatcacgaggccctttcgtc

SEQ ID NO: 112 - DNA, 6123 bp, Artificial Sequence
  Plasmid DNA: 54676
tcgcgcgtttcggtgatgacggtgaaaacctctgacacatgcagctcccggagacggtcacagcttgtctgtaagcggatgccgggagcagacaagcccgtcagggcgcgtcagcgggtgttggcgggtgtcggggctggcttaactatgcggcatcagagcagattgtactgagagtgcaccatatgcggtgtgaaataccgcacagatgcgtaaggagaaaataccgcatcagattggctattggccattgcatacgttgtatccatatcataatatgtacatttatattggctcatgtccaacattaccgccatgttgacattgattattgactagttattaatagtaatcaattacgggaacttccatagcccatatatggagttccgcgttacataacttacgggaatttccaaacctggctgaccgcccaacgacccccgcccattgacgtcaataatgacgtatgttcccatagtaacgccaatagggaacttccattgacgtcaatgggtggagtatttacggtaaactgcccacttgggaatttccaagtgtatcatatgccaagtacgccccctattgacgtcaatgacgggaacttccataagcttgcattatgcccagtacatgaccttatgggaatttcctacttggcagtacatctacgtattagtcatcgctattaccatggtgatgcggttttggcagtacatcaatgggcgtggatagcggtttgactcacgggaacttccaagtctccaccccattgacgtcaatgggagtttgttttgactcaccaaaatcaacgggaattcccaaaatgtcgtaacaactccgccccattgacgcaaatgggcggtaggcgtgtacggtgggaggtctatataagcagagctcgtttagtgaaccgtcagatcgcctggagacgccatccacgctgttttgacctccatagaagacaccgggaccgatccagcctccatcggctcgcatctctccttcacgcgcccgccgccctacctgaggccgccatccacgccggttgagtcgcgttctgccgcctcccgcctgtggtgcctcctgaactgcgtccgccgtctaggtaagtttaaagctcaggtcgagaccgggcctttgtccggcgctcccttggagcctacctagactcagccggctctccacgctttgcctgaccctgcttgctcaactctagttaacggtggagggcagtgtagtctgagcagtactcgttgctgccgcgcgcgccaccagacataatagctgacagactaacagactgttcctttccatgggtcttttctgcagtcaccgtcgtcgacacgtgtgatcagatatcgcggccgctctagagatatcgccaccatggagaagtttatcgccatcgccaccctggccagcacaaacgcctacgaccggatctgtatcggctaccagagcaacaacagcaccgacaccgtgaataccctgatcgagcagaacgtgcctgtgacccagacaatggaactggtggagaccgaaaagcaccccgcctactgtaatacagacctgggagcccctctggaactgagggactgtaagatcgaggccgtgatctacggcaaccccaagtgtgacatccacctgaaggatcagggctggagctacatcgtggagagacctagcgcccctgagggcatgtgttaccctggcagcgtggagaatctggaggagctgagattcgtgtttagcagcgccgccagctacaagaggatcaggctgttcgactacagcaggtggaacgtgacaagaagcggcaccagcaaggcctgtaatgccagcacaggcggccagagcttctacaggagcatcaactggctgaccaagaaggagcccgacacctacgatttcaacgagggcgcctacgtgaataacgaggacggcgacatcatctttctgtggggcatccaccaccctccagataccaaggagcagaccaccctgtacaagaacgccaacaccctgtctagcgtgaccaccaacaccatcaacaggagcttccagcccaatatcggccctagacctctggtgagaggccagcagggcagaatggattactactggggcatcctgaagagaggcgagaccctgaagatcaggaccaacggcaatctgatcgcccctgagtttggctatctgctgaagggcgagagctacggcagaatcatccagaacgaggacatccccatcggcaactgtaacaccaagtgccagacctatgccggagccatcaacagcagcaagcccttccagaatgccagcaggcactacatgggcgagtgccccaagtatgtgaagaaggccagcctgagactggctgtgggcctgagaaatacccctcagagggagaccagaggactgtttggagccatcgccggattcatcgagggaggatggagcggaatgatcgatggctggtacggcttccaccacagcaattctgagggcacaggaatggccgccgatcagaagtctacacaggaggccatcgacaagatcaccaacaaggtgaacaacatcgtggacaagatgaaccgggagttcgaggtggtgaaccacgagtttagcgaggtggagaagcggatcaacatgatcaacgacaagatcgacgaccagatcgaagatctgtgggcctacaatgccgaactgctggtgctgctggagaaccagaaaaccctggacgagcacgacagcaacgtgaagaacctgttcgacgaggtgaagaggagactgagcgccaatgccatcgatgccggaaacggctgctttgacatcctgcacaagtgtgataacgagtgtatggagaccatcaagaacggcacctacgaccacaaggagtatgaggaggaggccaagctggagaggagcaagatcaacggcgtgaagctggaggagaacaccacctacaagatcctgagcatctactctacagtggccgcctctctgtgtctggccatcctgattgccggaggactgatcctgggcatgcagaatggcagctgtcggtgtatgttctgtatctgatgaacacgtgggatccagatctgctgtgccttctagttgccagccatctgttgtttgcccctcccccgtgccttccttgaccctggaaggtgccactcccactgtcctttcctaataaaatgaggaaattgcatcgcattgtctgagtaggtgtcattctattctggggggtggggtggggcaggacagcaagggggaggattgggaagacaatagcaggcatgctggggatgcggtgggctctatgggtacccaggtgctgaagaattgacccggttcctcctgggccagaaagaagcaggcacatccccttctctgtgacacaccctgtccacgcccctggttcttagttccagccccactcataggacactcatagctcaggagggctccgccttcaatcccacccgctaaagtacttggagcggtctctccctccctcatcagcccaccaaaccaaacctagcctccaagagtgggaagaaattaaagcaagataggctattaagtgcagagggagagaaaatgcctccaacatgtgaggaagtaatgagagaaatcatagaattttaaggccatgatttaaggccatcatggccttaatcttccgcttcctcgctcactgactcgctgcgctcggtcgttcggctgcggcgagcggtatcagctcactcaaaggcggtaatacggttatccacagaatcaggggataacgcaggaaagaacatgtgagcaaaaggccagcaaaaggccaggaaccgtaaaaaggccgcgttgctggcgtttttccataggctccgcccccctgacgagcatcacaaaaatcgacgctcaagtcagaggtggcgaaacccgacaggactataaagataccaggcgtttccccctggaagctccctcgtgcgctctcctgttccgaccctgccgcttaccggatacctgtccgcctttctcccttcgggaagcgtggcgctttctcatagctcacgctgtaggtatctcagttcggtgtaggtcgttcgctccaagctgggctgtgtgcacgaaccccccgttcagcccgaccgctgcgccttatccggtaactatcgtcttgagtccaacccggtaagacacgacttatcgccactggcagcagccactggtaacaggattagcagagcgaggtatgtaggcggtgctacagagttcttgaagtggtggcctaactacggctacactagaagaacagtatttggtatctgcgctctgctgaagccagttaccttcggaaaaagagttggtagctcttgatccggcaaacaaaccaccgctggtagcggtggtttttttgtttgcaagcagcagattacgcgcagaaaaaaaggatctcaagaagatcctttgatcttttctacggggtctgacgctcagtggaacgaaaactcacgttaagggattttggtcatgagattatcaaaaaggatcttcacctagatccttttaaattaaaaatgaagttttaaatcaatctaaagtatatatgagtaaacttggtctgacagttaccaatgcttaatcagtgaggcacctatctcagcgatctgtctatttcgttcatccatagttgcctgactcggggggggggggcgctgaggtctgcctcgtgaagaaggtgttgctgactcataccaggcctgaatcgccccatcatccagccagaaagtgagggagccacggttgatgagagctttgttgtaggtggaccagttggtgattttgaacttttgctttgccacggaacggtctgcgttgtcgggaagatgcgtgatctgatccttcaactcagcaaaagttcgatttattcaacaaagccgccgtcccgtcaagtcagcgtaatgctctgccagtgttacaaccaattaaccaattctgattagaaaaactcatcgagcatcaaatgaaactgcaatttattcatatcaggattatcaataccatatttttgaaaaagccgtttctgtaatgaaggagaaaactcaccgaggcagttccataggatggcaagatcctggtatcggtctgcgattccgactcgtccaacatcaatacaacctattaatttcccctcgtcaaaaataaggttatcaagtgagaaatcaccatgagtgacgactgaatccggtgagaatggcaaaagcttatgcatttctttccagacttgttcaacaggccagccattacgctcgtcatcaaaatcactcgcatcaaccaaaccgttattcattcgtgattgcgcctgagcgagacgaaatacgcgatcgctgttaaaaggacaattacaaacaggaatcgaatgcaaccggcgcaggaacactgccagcgcatcaacaatattttcacctgaatcaggatattcttctaatacctggaatgctgttttcccggggatcgcagtggtgagtaaccatgcatcatcaggagtacggataaaatgcttgatggtcggaagaggcataaattccgtcagccagtttagtctgaccatctcatctgtaacatcattggcaacgctacctttgccatgtttcagaaacaactctggcgcatcgggcttcccatacaatcgatagattgtcgcacctgattgcccgacattatcgcgagcccatttatacccatataaatcagcatccatgttggaatttaatcgcggcctcgagcaagacgtttcccgttgaatatggctcataacaccccttgtattactgtttatgtaagcagacagttttattgttcatgatgatatatttttatcttgtgcaatgtaacatcagagattttgagacacaacgtggctttccccccccccccattattgaagcatttatcagggttattgtctcatgagcggatacatatttgaatgtatttagaaaaataaacaaataggggttccgcgcacatttccccgaaaagtgccacctgacgtctaagaaaccattattatcatgacattaacctataaaaataggcgtatcacgaggccctttcgtc

SEQ ID NO: 113 - DNA, 6120 bp, Artificial Sequence
  Plasmid DNA: 54677
tcgcgcgtttcggtgatgacggtgaaaacctctgacacatgcagctcccggagacggtcacagcttgtctgtaagcggatgccgggagcagacaagcccgtcagggcgcgtcagcgggtgttggcgggtgtcggggctggcttaactatgcggcatcagagcagattgtactgagagtgcaccatatgcggtgtgaaataccgcacagatgcgtaaggagaaaataccgcatcagattggctattggccattgcatacgttgtatccatatcataatatgtacatttatattggctcatgtccaacattaccgccatgttgacattgattattgactagttattaatagtaatcaattacgggaacttccatagcccatatatggagttccgcgttacataacttacgggaatttccaaacctggctgaccgcccaacgacccccgcccattgacgtcaataatgacgtatgttcccatagtaacgccaatagggaacttccattgacgtcaatgggtggagtatttacggtaaactgcccacttgggaatttccaagtgtatcatatgccaagtacgccccctattgacgtcaatgacgggaacttccataagcttgcattatgcccagtacatgaccttatgggaatttcctacttggcagtacatctacgtattagtcatcgctattaccatggtgatgcggttttggcagtacatcaatgggcgtggatagcggtttgactcacgggaacttccaagtctccaccccattgacgtcaatgggagtttgttttgactcaccaaaatcaacgggaattcccaaaatgtcgtaacaactccgccccattgacgcaaatgggcggtaggcgtgtacggtgggaggtctatataagcagagctcgtttagtgaaccgtcagatcgcctggagacgccatccacgctgttttgacctccatagaagacaccgggaccgatccagcctccatcggctcgcatctctccttcacgcgcccgccgccctacctgaggccgccatccacgccggttgagtcgcgttctgccgcctcccgcctgtggtgcctcctgaactgcgtccgccgtctaggtaagtttaaagctcaggtcgagaccgggcctttgtccggcgctcccttggagcctacctagactcagccggctctccacgctttgcctgaccctgcttgctcaactctagttaacggtggagggcagtgtagtctgagcagtactcgttgctgccgcgcgcgccaccagacataatagctgacagactaacagactgttcctttccatgggtcttttctgcagtcaccgtcgtcgacacgtgtgatcagatatcgcggccgctctagagatatcgccaccatggagaagttcatcatcctgagcacagtgctggccgccagctttgcctacgacaagatctgtatcggctaccagaccaacaatagcaccgagaccgtgaatacactgagcgagcagaacgtgcctgtgacacaggtggaagagctggtgcacagaggcatcgatcctatcctgtgtggcacagagctgggatctcctctggtgctggacgattgttctctggagggcctgatcctgggcaaccccaagtgtgacctgtacctgaacggccgcgagtggagctacatcgtggagaggcccaaggaaatggagggcgtgtgttaccctggcagcatcgagaatcaggaggagctgaggagcctgttcagcagcatcaagaaatacgagcgggtgaagatgttcgacttcaccaagtggaacgtgacctacaccggcacaagcaaggcctgtaacaacaccagcaaccagggcagcttctacagatccatgagatggctgaccctgaagagcggacagtttcccgtgcagaccgacgagtacaagaacacccgggacagcgacatcgtgtttacctgggccattcaccaccctcctaccagcgatgagcaggtgaagctgtacaagaaccctgacaccctgagcagcgtgacaaccgtggagatcaaccggagcttcaagcccaatatcggccctagacctctggtgagaggccagcagggcagaatggattactactgggccgtgctgaaacctggccagaccgtgaagatccagaccaacggcaatctgatcgcccctgagtatggccacctgatcacaggcaagagccacggcagaatcctgaagaacaacctgcctatgggccagtgtgtgaccgagtgccagctgaatgagggcgtgatgaacacctccaagcccttccagaataccagcaagcactacatcggcaagtgccccaagtacatccctagcggcagcctgaaactggccatcggcctgagaaatgtgcctcagagggagaccagaggactgtttggagccatcgccggattcatcgaaggaggatggcctggactggtcgccggatggtatggattccagcaccagaatgccgagggaacaggaattgccgccgacagagactctacacagcgggccatcgacaacatgcagaacaagctgaacaacgtgatcgacaagatgaacaagcagttcgaggtggtgaaccacgagtttagcgaggtggagagccggatcaacatgatcaacagcaagatcgacgaccagatcacagacatctgggcctacaatgccgaactgctggtgctgctggagaaccagaaaaccctggacgagcacgacgccaatgtgagaaacctgcacgacagagtgaggagagtgctgagggagaacgccatcgatacaggcgatggctgcttcgagatcctgcacaagtgtgacaacaactgtatggacaccatccggaacggcacctacaaccacaaggagtacgaggaggagtccaagatcgagcggcagaaagtgaatggcgtgaagctggaggagaactccacctacaagatcctgagcatctacagcagcgtggcctcttctctggtcctcctgctgatgatcatcggcggcttcatcttcggctgccagaacggcaatgtgaggtgtaccttctgtatctgatgaacacgtgggatccagatctgctgtgccttctagttgccagccatctgttgtttgcccctcccccgtgccttccttgaccctggaaggtgccactcccactgtcctttcctaataaaatgaggaaattgcatcgcattgtctgagtaggtgtcattctattctggggggtggggtggggcaggacagcaagggggaggattgggaagacaatagcaggcatgctggggatgcggtgggctctatgggtacccaggtgctgaagaattgacccggttcctcctgggccagaaagaagcaggcacatccccttctctgtgacacaccctgtccacgcccctggttcttagttccagccccactcataggacactcatagctcaggagggctccgccttcaatcccacccgctaaagtacttggagcggtctctccctccctcatcagcccaccaaaccaaacctagcctccaagagtgggaagaaattaaagcaagataggctattaagtgcagagggagagaaaatgcctccaacatgtgaggaagtaatgagagaaatcatagaattttaaggccatgatttaaggccatcatggccttaatcttccgcttcctcgctcactgactcgctgcgctcggtcgttcggctgcggcgagcggtatcagctcactcaaaggcggtaatacggttatccacagaatcaggggataacgcaggaaagaacatgtgagcaaaaggccagcaaaaggccaggaaccgtaaaaaggccgcgttgctggcgtttttccataggctccgcccccctgacgagcatcacaaaaatcgacgctcaagtcagaggtggcgaaacccgacaggactataaagataccaggcgtttccccctggaagctccctcgtgcgctctcctgttccgaccctgccgcttaccggatacctgtccgcctttctcccttcgggaagcgtggcgctttctcatagctcacgctgtaggtatctcagttcggtgtaggtcgttcgctccaagctgggctgtgtgcacgaaccccccgttcagcccgaccgctgcgccttatccggtaactatcgtcttgagtccaacccggtaagacacgacttatcgccactggcagcagccactggtaacaggattagcagagcgaggtatgtaggcggtgctacagagttcttgaagtggtggcctaactacggctacactagaagaacagtatttggtatctgcgctctgctgaagccagttaccttcggaaaaagagttggtagctcttgatccggcaaacaaaccaccgctggtagcggtggtttttttgtttgcaagcagcagattacgcgcagaaaaaaaggatctcaagaagatcctttgatcttttctacggggtctgacgctcagtggaacgaaaactcacgttaagggattttggtcatgagattatcaaaaaggatcttcacctagatccttttaaattaaaaatgaagttttaaatcaatctaaagtatatatgagtaaacttggtctgacagttaccaatgcttaatcagtgaggcacctatctcagcgatctgtctatttcgttcatccatagttgcctgactcggggggggggggcgctgaggtctgcctcgtgaagaaggtgttgctgactcataccaggcctgaatcgccccatcatccagccagaaagtgagggagccacggttgatgagagctttgttgtaggtggaccagttggtgattttgaacttttgctttgccacggaacggtctgcgttgtcgggaagatgcgtgatctgatccttcaactcagcaaaagttcgatttattcaacaaagccgccgtcccgtcaagtcagcgtaatgctctgccagtgttacaaccaattaaccaattctgattagaaaaactcatcgagcatcaaatgaaactgcaatttattcatatcaggattatcaataccatatttttgaaaaagccgtttctgtaatgaaggagaaaactcaccgaggcagttccataggatggcaagatcctggtatcggtctgcgattccgactcgtccaacatcaatacaacctattaatttcccctcgtcaaaaataaggttatcaagtgagaaatcaccatgagtgacgactgaatccggtgagaatggcaaaagcttatgcatttctttccagacttgttcaacaggccagccattacgctcgtcatcaaaatcactcgcatcaaccaaaccgttattcattcgtgattgcgcctgagcgagacgaaatacgcgatcgctgttaaaaggacaattacaaacaggaatcgaatgcaaccggcgcaggaacactgccagcgcatcaacaatattttcacctgaatcaggatattcttctaatacctggaatgctgttttcccggggatcgcagtggtgagtaaccatgcatcatcaggagtacggataaaatgcttgatggtcggaagaggcataaattccgtcagccagtttagtctgaccatctcatctgtaacatcattggcaacgctacctttgccatgtttcagaaacaactctggcgcatcgggcttcccatacaatcgatagattgtcgcacctgattgcccgacattatcgcgagcccatttatacccatataaatcagcatccatgttggaatttaatcgcggcctcgagcaagacgtttcccgttgaatatggctcataacaccccttgtattactgtttatgtaagcagacagttttattgttcatgatgatatatttttatcttgtgcaatgtaacatcagagattttgagacacaacgtggctttccccccccccccattattgaagcatttatcagggttattgtctcatgagcggatacatatttgaatgtatttagaaaaataaacaaataggggttccgcgcacatttccccgaaaagtgccacctgacgtctaagaaaccattattatcatgacattaacctataaaaataggcgtatcacgaggccctttcgtc

SEQ ID NO: 114 - DNA, 6120 bp, Artificial Sequence
  Plasmid DNA: 53957
tcgcgcgtttcggtgatgacggtgaaaacctctgacacatgcagctcccggagacggtcacagcttgtctgtaagcggatgccgggagcagacaagcccgtcagggcgcgtcagcgggtgttggcgggtgtcggggctggcttaactatgcggcatcagagcagattgtactgagagtgcaccatatgcggtgtgaaataccgcacagatgcgtaaggagaaaataccgcatcagattggctattggccattgcatacgttgtatccatatcataatatgtacatttatattggctcatgtccaacattaccgccatgttgacattgattattgactagttattaatagtaatcaattacgggaacttccatagcccatatatggagttccgcgttacataacttacgggaatttccaaacctggctgaccgcccaacgacccccgcccattgacgtcaataatgacgtatgttcccatagtaacgccaatagggaacttccattgacgtcaatgggtggagtatttacggtaaactgcccacttgggaatttccaagtgtatcatatgccaagtacgccccctattgacgtcaatgacgggaacttccataagcttgcattatgcccagtacatgaccttatgggaatttcctacttggcagtacatctacgtattagtcatcgctattaccatggtgatgcggttttggcagtacatcaatgggcgtggatagcggtttgactcacgggaacttccaagtctccaccccattgacgtcaatgggagtttgttttgactcaccaaaatcaacgggaattcccaaaatgtcgtaacaactccgccccattgacgcaaatgggcggtaggcgtgtacggtgggaggtctatataagcagagctcgtttagtgaaccgtcagatcgcctggagacgccatccacgctgttttgacctccatagaagacaccgggaccgatccagcctccatcggctcgcatctctccttcacgcgcccgccgccctacctgaggccgccatccacgccggttgagtcgcgttctgccgcctcccgcctgtggtgcctcctgaactgcgtccgccgtctaggtaagtttaaagctcaggtcgagaccgggcctttgtccggcgctcccttggagcctacctagactcagccggctctccacgctttgcctgaccctgcttgctcaactctagttaacggtggagggcagtgtagtctgagcagtactcgttgctgccgcgcgcgccaccagacataatagctgacagactaacagactgttcctttccatgggtcttttctgcagtcaccgtcgtcgacacgtgtgatcagatatcgcggccgctctagagatatcgccaccatgaaggccaaactgctggtgctgctgtgtgccctggccgccacagatgccgataccatctgtatcggctaccacgccaacaatagcaccgacaccgtggatacactgctggagaagaacgtgaccgtgacccactctgtgaacctgctggaggacagccacaatggcaagctgtgtaagctgaaaggcatcgcccctctgcagctgggcaagtgtaatatcgccggatggctgctgggaaaccccgagtgtgattctctgctgcctgccaagagctggagctacatcgtggagacccccaattctgagaatggcgcctgctaccctggcgacttcatcgattacgaggagctgaaggagcagctgagttctgtctctagcctggagagattcgagatcttccccaaggagagcagctggcccaatcacaataccctgaagggagtgacagccgcctgtagccacagaggcaagagcagcttctaccggaatctgctgtggctgaccaagaccggcgatagctaccccaagctgaacaacagctacgtgaacaacaagggcaaggaagtgctggtgctgtggggagtgcaccaccctagcagcagcaatgagcagcagagcctgtaccacaacgtgaacgcctatgtgagcgtggtgtccagcaactacaaccggagattcacccctgaaatcgccgccagacccaaagtgagagaccagcccggcaggatgaattactactggaccctgctggagcctggcgataccatcatctttgaggccaccggcaatctgattgccccttggtacgcctttgccctgagcagaggctttggcagcggcatcatcacaagcaacgccagcatgcacgagtgtaacaccaagagccagacacctcagggcgccatcaatagcagcctgcccttccagaatatccaccccgtgcctatcggcgagtgtcccaagtatgtgaggagcaccaagctgagaatggtgaccggcctgagaaacatccctcagagggagaccagaggactgtttggagccatcgccggattcatcgagggaggatggaccggaatgatcgatggctggtacggctaccaccaccagaatgagcagggctctggatatgccgccgatcagaagtctacccagaacgccatcaacggcatcaccaacaaggtgaacagcatcatcgagaagatgaacacccagttcaccgccgtgtccaaggagttcaacaacctggagaagcggatggagaacctgaacaagaaggtggacgacggctttctggacatctggacctacaatgccgagctgctcgtgctgctcgagaatgagaggaccctggacttccacgacagcaacgtgaagaacctgtatgagaaggtgaagagccagctgaagaacaacgccaaggagatcggcaacggctgcttcgagttctaccacaagtgtgacaacgagtgtatggagtctgtgaggaacggcacctacgactaccctaagtacagcgaggagagcaagctgaaccgggagaagatcgatagcggcagactggtgcctagaggatctcctggcagcggatatattcctgaggcccctagagatggacaggcctatgtgagaaaggatggcgaatgggtgctgctgtctacatttctgggacaccaccatcaccaccattgatgaacacgtgggatccagatctgctgtgccttctagttgccagccatctgttgtttgcccctcccccgtgccttccttgaccctggaaggtgccactcccactgtcctttcctaataaaatgaggaaattgcatcgcattgtctgagtaggtgtcattctattctggggggtggggtggggcaggacagcaagggggaggattgggaagacaatagcaggcatgctggggatgcggtgggctctatgggtacccaggtgctgaagaattgacccggttcctcctgggccagaaagaagcaggcacatccccttctctgtgacacaccctgtccacgcccctggttcttagttccagccccactcataggacactcatagctcaggagggctccgccttcaatcccacccgctaaagtacttggagcggtctctccctccctcatcagcccaccaaaccaaacctagcctccaagagtgggaagaaattaaagcaagataggctattaagtgcagagggagagaaaatgcctccaacatgtgaggaagtaatgagagaaatcatagaattttaaggccatgatttaaggccatcatggccttaatcttccgcttcctcgctcactgactcgctgcgctcggtcgttcggctgcggcgagcggtatcagctcactcaaaggcggtaatacggttatccacagaatcaggggataacgcaggaaagaacatgtgagcaaaaggccagcaaaaggccaggaaccgtaaaaaggccgcgttgctggcgtttttccataggctccgcccccctgacgagcatcacaaaaatcgacgctcaagtcagaggtggcgaaacccgacaggactataaagataccaggcgtttccccctggaagctccctcgtgcgctctcctgttccgaccctgccgcttaccggatacctgtccgcctttctcccttcgggaagcgtggcgctttctcatagctcacgctgtaggtatctcagttcggtgtaggtcgttcgctccaagctgggctgtgtgcacgaaccccccgttcagcccgaccgctgcgccttatccggtaactatcgtcttgagtccaacccggtaagacacgacttatcgccactggcagcagccactggtaacaggattagcagagcgaggtatgtaggcggtgctacagagttcttgaagtggtggcctaactacggctacactagaagaacagtatttggtatctgcgctctgctgaagccagttaccttcggaaaaagagttggtagctcttgatccggcaaacaaaccaccgctggtagcggtggtttttttgtttgcaagcagcagattacgcgcagaaaaaaaggatctcaagaagatcctttgatcttttctacggggtctgacgctcagtggaacgaaaactcacgttaagggattttggtcatgagattatcaaaaaggatcttcacctagatccttttaaattaaaaatgaagttttaaatcaatctaaagtatatatgagtaaacttggtctgacagttaccaatgcttaatcagtgaggcacctatctcagcgatctgtctatttcgttcatccatagttgcctgactcggggggggggggcgctgaggtctgcctcgtgaagaaggtgttgctgactcataccaggcctgaatcgccccatcatccagccagaaagtgagggagccacggttgatgagagctttgttgtaggtggaccagttggtgattttgaacttttgctttgccacggaacggtctgcgttgtcgggaagatgcgtgatctgatccttcaactcagcaaaagttcgatttattcaacaaagccgccgtcccgtcaagtcagcgtaatgctctgccagtgttacaaccaattaaccaattctgattagaaaaactcatcgagcatcaaatgaaactgcaatttattcatatcaggattatcaataccatatttttgaaaaagccgtttctgtaatgaaggagaaaactcaccgaggcagttccataggatggcaagatcctggtatcggtctgcgattccgactcgtccaacatcaatacaacctattaatttcccctcgtcaaaaataaggttatcaagtgagaaatcaccatgagtgacgactgaatccggtgagaatggcaaaagcttatgcatttctttccagacttgttcaacaggccagccattacgctcgtcatcaaaatcactcgcatcaaccaaaccgttattcattcgtgattgcgcctgagcgagacgaaatacgcgatcgctgttaaaaggacaattacaaacaggaatcgaatgcaaccggcgcaggaacactgccagcgcatcaacaatattttcacctgaatcaggatattcttctaatacctggaatgctgttttcccggggatcgcagtggtgagtaaccatgcatcatcaggagtacggataaaatgcttgatggtcggaagaggcataaattccgtcagccagtttagtctgaccatctcatctgtaacatcattggcaacgctacctttgccatgtttcagaaacaactctggcgcatcgggcttcccatacaatcgatagattgtcgcacctgattgcccgacattatcgcgagcccatttatacccatataaatcagcatccatgttggaatttaatcgcggcctcgagcaagacgtttcccgttgaatatggctcataacaccccttgtattactgtttatgtaagcagacagttttattgttcatgatgatatatttttatcttgtgcaatgtaacatcagagattttgagacacaacgtggctttccccccccccccattattgaagcatttatcagggttattgtctcatgagcggatacatatttgaatgtatttagaaaaataaacaaataggggttccgcgcacatttccccgaaaagtgccacctgacgtctaagaaaccattattatcatgacattaacctataaaaataggcgtatcacgaggccctttcgtc

SEQ ID NO: 115 - DNA, 6118 bp, Artificial Sequence
  Plasmid DNA: 54510
tcgcgcgtttcggtgatgacggtgaaaacctctgacacatgcagctcccggagacggtcacagcttgtctgtaagcggatgccgggagcagacaagcccgtcagggcgcgtcagcgggtgttggcgggtgtcggggctggcttaactatgcggcatcagagcagattgtactgagagtgcaccatatgcggtgtgaaataccgcacagatgcgtaaggagaaaataccgcatcagattggctattggccattgcatacgttgtatccatatcataatatgtacatttatattggctcatgtccaacattaccgccatgttgacattgattattgactagttattaatagtaatcaattacgggaacttccatagcccatatatggagttccgcgttacataacttacgggaatttccaaacctggctgaccgcccaacgacccccgcccattgacgtcaataatgacgtatgttcccatagtaacgccaatagggaacttccattgacgtcaatgggtggagtatttacggtaaactgcccacttgggaatttccaagtgtatcatatgccaagtacgccccctattgacgtcaatgacgggaacttccataagcttgcattatgcccagtacatgaccttatgggaatttcctacttggcagtacatctacgtattagtcatcgctattaccatggtgatgcggttttggcagtacatcaatgggcgtggatagcggtttgactcacgggaacttccaagtctccaccccattgacgtcaatgggagtttgttttgactcaccaaaatcaacgggaattcccaaaatgtcgtaacaactccgccccattgacgcaaatgggcggtaggcgtgtacggtgggaggtctatataagcagagctcgtttagtgaaccgtcagatcgcctggagacgccatccacgctgttttgacctccatagaagacaccgggaccgatccagcctccatcggctcgcatctctccttcacgcgcccgccgccctacctgaggccgccatccacgccggttgagtcgcgttctgccgcctcccgcctgtggtgcctcctgaactgcgtccgccgtctaggtaagtttaaagctcaggtcgagaccgggcctttgtccggcgctcccttggagcctacctagactcagccggctctccacgctttgcctgaccctgcttgctcaactctagttaacggtggagggcagtgtagtctgagcagtactcgttgctgccgcgcgcgccaccagacataatagctgacagactaacagactgttcctttccatgggtcttttctgcagtcaccgtcgtcgacacgtgtgatcagatatcgcggccgctctagagatatcgccaccatggagaagatcgtgctgctgttcgccatcgtgagcctggtgaagagcgatcagatctgcatcggataccacgccaataatagcacagagcaggtggatacaatcatggagaagaatgtgacagtgacacacgcccaggatatcctggagaagacacacaatggaaagctgtgcgatctggatggagtgaagcctctgatcctgagagattgcagcgtggccggatggctgctgggaaatcctatgtgcgatgagttcatcaatgtgcctgagtggagctacatcgtggagaaggccaatcctgtgaatgatctgtgctaccctggagatttcaatgattacgaggagctgaagcacctgctgagcagaatcaatcacttcgagaagatccagatcatccctaagagcagctggagcagccacgaggccagcctgggagtgagcagcgcctgcccttaccagagaaagagcagcttcttcagaaatgtggtgtggctgatcaagaagaatagcacataccctacaatcaagagaagctacaataatacaaatcaggaggatctgctggtgctgtggggaatccaccaccctaatgatgccgccgagcagacaaagctgtaccagaatcctacaacatacatcagcgtgggaacaagcacactgaatcagagactggtgcctagaatcgccacaagaagcaaggtgaatggacagagcggaagaatggagttcttctggacaatcctgaagcctaatgatgccatcaatttcgagagcaatggaaatttcatcgctcctgagtacgcctacaagatcgtgaagaagggagatagcacaatcatgaagagcgagctggagtacggaaattgcaatacaaagtgccagacacctatgggagccatcaatagcagcatgcctttccacaatatccaccctctgacaatcggagagtgccctaagtacgtgaagagcaatagactggtgctggccacaggactgagaaatagccctcagagagagacgagaggactgttcggagccatcgccggattcatcgagggaggatggcagggaatggtggatggatggtacggataccaccacagcaatgagcagggaagcggatacgccgccgataaggagagcacacagaaggccatcgatggagtgacaaataaggtgaatagcatcatcgataagatgaatacacagttcgaggccgtgggaagagagttcaataatctggagagaagaatcgagaatctgaataagaagatggaggatggattcctggatgtgtggacatacaatgccgagctgctggtgctgatggagaatgagagaacactggatttccacgatagcaatgtgaagaatctgtacgataaggtgagactgcagctgagagataatgccaaggagctgggaaatggatgcttcgagttctaccacaagtgcgataatgagtgcatggagagcgtgagaaatggaacatacgattaccctcagtacagcgaggaggccagactgaagagagaggagatcagcggagtgaagctggagagcatcggaatctaccagatcctgagcatctacagcacagtggccagcagcctggccctggccatcatggtggccggactgagcctgtggatgtgcagcaatggaagcctgcagtgcagaatctgcatctgagcggccgcggatccagatctgctgtgccttctagttgccagccatctgttgtttgcccctcccccgtgccttccttgaccctggaaggtgccactcccactgtcctttcctaataaaatgaggaaattgcatcgcattgtctgagtaggtgtcattctattctggggggtggggtggggcaggacagcaagggggaggattgggaagacaatagcaggcatgctggggatgcggtgggctctatgggtacccaggtgctgaagaattgacccggttcctcctgggccagaaagaagcaggcacatccccttctctgtgacacaccctgtccacgcccctggttcttagttccagccccactcataggacactcatagctcaggagggctccgccttcaatcccacccgctaaagtacttggagcggtctctccctccctcatcagcccaccaaaccaaacctagcctccaagagtgggaagaaattaaagcaagataggctattaagtgcagagggagagaaaatgcctccaacatgtgaggaagtaatgagagaaatcatagaattttaaggccatgatttaaggccatcatggccttaatcttccgcttcctcgctcactgactcgctgcgctcggtcgttcggctgcggcgagcggtatcagctcactcaaaggcggtaatacggttatccacagaatcaggggataacgcaggaaagaacatgtgagcaaaaggccagcaaaaggccaggaaccgtaaaaaggccgcgttgctggcgtttttccataggctccgcccccctgacgagcatcacaaaaatcgacgctcaagtcagaggtggcgaaacccgacaggactataaagataccaggcgtttccccctggaagctccctcgtgcgctctcctgttccgaccctgccgcttaccggatacctgtccgcctttctcccttcgggaagcgtggcgctttctcatagctcacgctgtaggtatctcagttcggtgtaggtcgttcgctccaagctgggctgtgtgcacgaaccccccgttcagcccgaccgctgcgccttatccggtaactatcgtcttgagtccaacccggtaagacacgacttatcgccactggcagcagccactggtaacaggattagcagagcgaggtatgtaggcggtgctacagagttcttgaagtggtggcctaactacggctacactagaagaacagtatttggtatctgcgctctgctgaagccagttaccttcggaaaaagagttggtagctcttgatccggcaaacaaaccaccgctggtagcggtggtttttttgtttgcaagcagcagattacgcgcagaaaaaaaggatctcaagaagatcctttgatcttttctacggggtctgacgctcagtggaacgaaaactcacgttaagggattttggtcatgagattatcaaaaaggatcttcacctagatccttttaaattaaaaatgaagttttaaatcaatctaaagtatatatgagtaaacttggtctgacagttaccaatgcttaatcagtgaggcacctatctcagcgatctgtctatttcgttcatccatagttgcctgactcggggggggggggcgctgaggtctgcctcgtgaagaaggtgttgctgactcataccaggcctgaatcgccccatcatccagccagaaagtgagggagccacggttgatgagagctttgttgtaggtggaccagttggtgattttgaacttttgctttgccacggaacggtctgcgttgtcgggaagatgcgtgatctgatccttcaactcagcaaaagttcgatttattcaacaaagccgccgtcccgtcaagtcagcgtaatgctctgccagtgttacaaccaattaaccaattctgattagaaaaactcatcgagcatcaaatgaaactgcaatttattcatatcaggattatcaataccatatttttgaaaaagccgtttctgtaatgaaggagaaaactcaccgaggcagttccataggatggcaagatcctggtatcggtctgcgattccgactcgtccaacatcaatacaacctattaatttcccctcgtcaaaaataaggttatcaagtgagaaatcaccatgagtgacgactgaatccggtgagaatggcaaaagcttatgcatttctttccagacttgttcaacaggccagccattacgctcgtcatcaaaatcactcgcatcaaccaaaccgttattcattcgtgattgcgcctgagcgagacgaaatacgcgatcgctgttaaaaggacaattacaaacaggaatcgaatgcaaccggcgcaggaacactgccagcgcatcaacaatattttcacctgaatcaggatattcttctaatacctggaatgctgttttcccggggatcgcagtggtgagtaaccatgcatcatcaggagtacggataaaatgcttgatggtcggaagaggcataaattccgtcagccagtttagtctgaccatctcatctgtaacatcattggcaacgctacctttgccatgtttcagaaacaactctggcgcatcgggcttcccatacaatcgatagattgtcgcacctgattgcccgacattatcgcgagcccatttatacccatataaatcagcatccatgttggaatttaatcgcggcctcgagcaagacgtttcccgttgaatatggctcataacaccccttgtattactgtttatgtaagcagacagttttattgttcatgatgatatatttttatcttgtgcaatgtaacatcagagattttgagacacaacgtggctttccccccccccccattattgaagcatttatcagggttattgtctcatgagcggatacatatttgaatgtatttagaaaaataaacaaataggggttccgcgcacatttccccgaaaagtgccacctgacgtctaagaaaccattattatcatgacattaacctataaaaataggcgtatcacgaggccctttcgtc

SEQ ID NO: 116 - DNA, 6105 bp, Artificial Sequence
  Plasmid DNA: 54671
tcgcgcgtttcggtgatgacggtgaaaacctctgacacatgcagctcccggagacggtcacagcttgtctgtaagcggatgccgggagcagacaagcccgtcagggcgcgtcagcgggtgttggcgggtgtcggggctggcttaactatgcggcatcagagcagattgtactgagagtgcaccatatgcggtgtgaaataccgcacagatgcgtaaggagaaaataccgcatcagattggctattggccattgcatacgttgtatccatatcataatatgtacatttatattggctcatgtccaacattaccgccatgttgacattgattattgactagttattaatagtaatcaattacgggaacttccatagcccatatatggagttccgcgttacataacttacgggaatttccaaacctggctgaccgcccaacgacccccgcccattgacgtcaataatgacgtatgttcccatagtaacgccaatagggaacttccattgacgtcaatgggtggagtatttacggtaaactgcccacttgggaatttccaagtgtatcatatgccaagtacgccccctattgacgtcaatgacgggaacttccataagcttgcattatgcccagtacatgaccttatgggaatttcctacttggcagtacatctacgtattagtcatcgctattaccatggtgatgcggttttggcagtacatcaatgggcgtggatagcggtttgactcacgggaacttccaagtctccaccccattgacgtcaatgggagtttgttttgactcaccaaaatcaacgggaattcccaaaatgtcgtaacaactccgccccattgacgcaaatgggcggtaggcgtgtacggtgggaggtctatataagcagagctcgtttagtgaaccgtcagatcgcctggagacgccatccacgctgttttgacctccatagaagacaccgggaccgatccagcctccatcggctcgcatctctccttcacgcgcccgccgccctacctgaggccgccatccacgccggttgagtcgcgttctgccgcctcccgcctgtggtgcctcctgaactgcgtccgccgtctaggtaagtttaaagctcaggtcgagaccgggcctttgtccggcgctcccttggagcctacctagactcagccggctctccacgctttgcctgaccctgcttgctcaactctagttaacggtggagggcagtgtagtctgagcagtactcgttgctgccgcgcgcgccaccagacataatagctgacagactaacagactgttcctttccatgggtcttttctgcagtcaccgtcgtcgacacgtgtgatcagatatcgcggccgctctagagatatcgccaccatgaacacccagatcctgattctggccctggtggccatcattcccaccaacgccgacaagatctgtctgggacaccacgccgtgtctaatggcgccaaggtgaacaccctgaccgagaggggcgtggaagtggtgaatgccaccgagaccgtggagagaaccaacgtgcccaggatctgtagcaagggcaagagaaccgtggatctgggacagtgtggactgctgggcacaatcacaggacccccccagtgtgatcagttcctggagttcagcgccgatctgatcatcgagcggagagaaggcaacgatgtgtgctaccccggcaagttcgtgaatgaggaggccctgaggcagatcctgagaaagagcggcggcatcgacaaggaaaccatgggcttcacctacagcggcatcagaaccaatggagccacctccgcctgtagaagaagcggcagcagcttctacgccgagatgaagtggctgctgtccaacacagacaatgccgccttcccccagatgaccaagagctacaagaacatcaggaaggaccccgccctgatcatttggggcatccaccactctggatctacagccgagcagaccaagctgtatggcagcggcaacaagctgatcacagtgggcagcagcaattaccagcagagcttcgtgccttctcctggagccagacctcaggtgaacggccagagcggcagaatcgatttccactggctgatgctgaaccccaacgacaccgtgaccttcagcttcaacggcgcctttatcgcccctgatagggcctctttcctgaggggcaagagcatgggcatccagtctgaagtgcaggtggacgccaattgtgagggcgattgctaccacagcggcggcacaattctgagcagcctgcccttccagaacatcaacagcaggacagtgggcgagtgtcccagatatgtgaagcaggagagcctgctgctggccacaggcatgaagaacgtgccccagagagagacaagaggcctgtttggagccatcgccggattcatcgagaatggctgggagggactggtggatggctggtacggcttcagacaccagaatgcccagggagaaggaacagccgccgactacaagtctacacagagcgccatcgatcagatcaccggcaagctgaacaggctgatcgagaaaaccaatcagcagtttgagctgatcgacaacgagttcaccgaggtggagaagcagatcggcaacgtgatcaactggaccagagacagcctgacagagatgtggagctacaacgccgaactgctggtggccatggagaatcagcacaccatcgacctggccgacagcgagatgaacaagctgtacgagagagtgaggaggcagctgagagagaatgccgaggaggacggcacaggctgcttcgagatcttccacaagtgtgacgacgactgtatggccagcatccggaacaacacctacgaccacagcaagtacagagaggaggccatccagaacagaatccagatcgaccccgtgaaactgagcagcggctacaaggatgtgatcctgtggttcagctttggcgccagctgctttatcctgctggccatcgccatgggcctggtgttcatctgtgtgaagaacggcaacatgaggtgtaccatctgtatctgatgaacacgtgggatccagatctgctgtgccttctagttgccagccatctgttgtttgcccctcccccgtgccttccttgaccctggaaggtgccactcccactgtcctttcctaataaaatgaggaaattgcatcgcattgtctgagtaggtgtcattctattctggggggtggggtggggcaggacagcaagggggaggattgggaagacaatagcaggcatgctggggatgcggtgggctctatgggtacccaggtgctgaagaattgacccggttcctcctgggccagaaagaagcaggcacatccccttctctgtgacacaccctgtccacgcccctggttcttagttccagccccactcataggacactcatagctcaggagggctccgccttcaatcccacccgctaaagtacttggagcggtctctccctccctcatcagcccaccaaaccaaacctagcctccaagagtgggaagaaattaaagcaagataggctattaagtgcagagggagagaaaatgcctccaacatgtgaggaagtaatgagagaaatcatagaattttaaggccatgatttaaggccatcatggccttaatcttccgcttcctcgctcactgactcgctgcgctcggtcgttcggctgcggcgagcggtatcagctcactcaaaggcggtaatacggttatccacagaatcaggggataacgcaggaaagaacatgtgagcaaaaggccagcaaaaggccaggaaccgtaaaaaggccgcgttgctggcgtttttccataggctccgcccccctgacgagcatcacaaaaatcgacgctcaagtcagaggtggcgaaacccgacaggactataaagataccaggcgtttccccctggaagctccctcgtgcgctctcctgttccgaccctgccgcttaccggatacctgtccgcctttctcccttcgggaagcgtggcgctttctcatagctcacgctgtaggtatctcagttcggtgtaggtcgttcgctccaagctgggctgtgtgcacgaaccccccgttcagcccgaccgctgcgccttatccggtaactatcgtcttgagtccaacccggtaagacacgacttatcgccactggcagcagccactggtaacaggattagcagagcgaggtatgtaggcggtgctacagagttcttgaagtggtggcctaactacggctacactagaagaacagtatttggtatctgcgctctgctgaagccagttaccttcggaaaaagagttggtagctcttgatccggcaaacaaaccaccgctggtagcggtggtttttttgtttgcaagcagcagattacgcgcagaaaaaaaggatctcaagaagatcctttgatcttttctacggggtctgacgctcagtggaacgaaaactcacgttaagggattttggtcatgagattatcaaaaaggatcttcacctagatccttttaaattaaaaatgaagttttaaatcaatctaaagtatatatgagtaaacttggtctgacagttaccaatgcttaatcagtgaggcacctatctcagcgatctgtctatttcgttcatccatagttgcctgactcggggggggggggcgctgaggtctgcctcgtgaagaaggtgttgctgactcataccaggcctgaatcgccccatcatccagccagaaagtgagggagccacggttgatgagagctttgttgtaggtggaccagttggtgattttgaacttttgctttgccacggaacggtctgcgttgtcgggaagatgcgtgatctgatccttcaactcagcaaaagttcgatttattcaacaaagccgccgtcccgtcaagtcagcgtaatgctctgccagtgttacaaccaattaaccaattctgattagaaaaactcatcgagcatcaaatgaaactgcaatttattcatatcaggattatcaataccatatttttgaaaaagccgtttctgtaatgaaggagaaaactcaccgaggcagttccataggatggcaagatcctggtatcggtctgcgattccgactcgtccaacatcaatacaacctattaatttcccctcgtcaaaaataaggttatcaagtgagaaatcaccatgagtgacgactgaatccggtgagaatggcaaaagcttatgcatttctttccagacttgttcaacaggccagccattacgctcgtcatcaaaatcactcgcatcaaccaaaccgttattcattcgtgattgcgcctgagcgagacgaaatacgcgatcgctgttaaaaggacaattacaaacaggaatcgaatgcaaccggcgcaggaacactgccagcgcatcaacaatattttcacctgaatcaggatattcttctaatacctggaatgctgttttcccggggatcgcagtggtgagtaaccatgcatcatcaggagtacggataaaatgcttgatggtcggaagaggcataaattccgtcagccagtttagtctgaccatctcatctgtaacatcattggcaacgctacctttgccatgtttcagaaacaactctggcgcatcgggcttcccatacaatcgatagattgtcgcacctgattgcccgacattatcgcgagcccatttatacccatataaatcagcatccatgttggaatttaatcgcggcctcgagcaagacgtttcccgttgaatatggctcataacaccccttgtattactgtttatgtaagcagacagttttattgttcatgatgatatatttttatcttgtgcaatgtaacatcagagattttgagacacaacgtggctttccccccccccccattattgaagcatttatcagggttattgtctcatgagcggatacatatttgaatgtatttagaaaaataaacaaataggggttccgcgcacatttccccgaaaagtgccacctgacgtctaagaaaccattattatcatgacattaacctataaaaataggcgtatcacgaggccctttcgtc

SEQ ID NO: 117 - DNA, 6108 bp, Artificial Sequence
  Plasmid DNA: 54672
tcgcgcgtttcggtgatgacggtgaaaacctctgacacatgcagctcccggagacggtcacagcttgtctgtaagcggatgccgggagcagacaagcccgtcagggcgcgtcagcgggtgttggcgggtgtcggggctggcttaactatgcggcatcagagcagattgtactgagagtgcaccatatgcggtgtgaaataccgcacagatgcgtaaggagaaaataccgcatcagattggctattggccattgcatacgttgtatccatatcataatatgtacatttatattggctcatgtccaacattaccgccatgttgacattgattattgactagttattaatagtaatcaattacgggaacttccatagcccatatatggagttccgcgttacataacttacgggaatttccaaacctggctgaccgcccaacgacccccgcccattgacgtcaataatgacgtatgttcccatagtaacgccaatagggaacttccattgacgtcaatgggtggagtatttacggtaaactgcccacttgggaatttccaagtgtatcatatgccaagtacgccccctattgacgtcaatgacgggaacttccataagcttgcattatgcccagtacatgaccttatgggaatttcctacttggcagtacatctacgtattagtcatcgctattaccatggtgatgcggttttggcagtacatcaatgggcgtggatagcggtttgactcacgggaacttccaagtctccaccccattgacgtcaatgggagtttgttttgactcaccaaaatcaacgggaattcccaaaatgtcgtaacaactccgccccattgacgcaaatgggcggtaggcgtgtacggtgggaggtctatataagcagagctcgtttagtgaaccgtcagatcgcctggagacgccatccacgctgttttgacctccatagaagacaccgggaccgatccagcctccatcggctcgcatctctccttcacgcgcccgccgccctacctgaggccgccatccacgccggttgagtcgcgttctgccgcctcccgcctgtggtgcctcctgaactgcgtccgccgtctaggtaagtttaaagctcaggtcgagaccgggcctttgtccggcgctcccttggagcctacctagactcagccggctctccacgctttgcctgaccctgcttgctcaactctagttaacggtggagggcagtgtagtctgagcagtactcgttgctgccgcgcgcgccaccagacataatagctgacagactaacagactgttcctttccatgggtcttttctgcagtcaccgtcgtcgacacgtgtgatcagatatcgcggccgctctagagatatcgccaccatggagaccatcagcctgatcaccatcctgctggtggtgacagccagcaacgccgacaagatctgtatcggccaccagagcaccaatagcaccgagaccgtggataccctgaccgagaccaatgtgcctgtgacacacgccaaagagctgctgcacaccgagcacaatggaatgctgtgtgccacaagcctgggacaccctctgatcctggacacctgtacaatcgagggcctggtgtacggcaatcccagctgtgatctgctgctggagggccgggagtggagctacatcgtggagagaagcagcgccgtgaatggcacatgctaccccggcaacgtggagaatctggaggagctgaggaccctgtttagcagcgccagcagctaccagagaatccagatcttccccgacaccacctggaatgtgacctacaccggcacaagcagagcctgtagcggcagcttctaccggtctatgagatggctgacccagaagagcggcttttaccctgtgcaggacgcccagtacaccaacaaccggggcaagagcatcctgtttgtgtggggcattcaccaccctcctacctacaccgagcagaccaacctgtacatccggaacgacaccaccacaagcgtgaccaccgaggacctgaacagaaccttcaagcccgtgatcggacctagacctctggtgaatggcctgcagggcaggatcgattactactggagcgtgctgaagcctggacagaccctgagagtgaggagcaacggcaatctgatcgccccttggtatggacatgtgctgtctggaggaagccacggcagaatcctgaaaaccgacctgaagagcggcaattgtgtggtgcagtgccagacagagaagggcggcctgaatagcacactgcccttccacaacatcagcaagtacgccttcggcacctgtcccaagtatgtgagggtgaacagcctgaaactggctgtgggcctgagaaatgtgcctcagagggagaccagaggactgtttggagccatcgccggattcatcgaagggggatggcctggactggtggccggatggtatggcttccagcacagcaatgatcagggagtgggaatggccgccgatagagactctacccagaaggccatcgacaagatcaccagcaaggtgaacaacatcgtggacaagatgaacaagcagtacgagatcatcgaccacgagttcagcgaggtggagaccaggctgaacatgatcaacaacaagatcgacgaccagatccaggatgtgtgggcctataatgccgaactgctggtgctgctggaaaaccagaaaaccctggacgagcacgacgccaacgtgaacaatctgtacaacaaggtgaagagagccctgggaagcaacgccatggaggatggcaagggctgctttgagctgtaccacaagtgtgacgaccagtgtatggagacaatcaggaacggcacctacaaccggaggaagtacagggaggagagcagactggagaggcagaaaatcgagggcgtgaagctggaatctgagggcgcctacaagatcctgaccatctacagcacagtggcctcttctctggtgctggccatgggatttgccgcctttctgttctgggccatgagcaatggcagctgccggtgtaacatctgtatctgatgaacacgtgggatccagatctgctgtgccttctagttgccagccatctgttgtttgcccctcccccgtgccttccttgaccctggaaggtgccactcccactgtcctttcctaataaaatgaggaaattgcatcgcattgtctgagtaggtgtcattctattctggggggtggggtggggcaggacagcaagggggaggattgggaagacaatagcaggcatgctggggatgcggtgggctctatgggtacccaggtgctgaagaattgacccggttcctcctgggccagaaagaagcaggcacatccccttctctgtgacacaccctgtccacgcccctggttcttagttccagccccactcataggacactcatagctcaggagggctccgccttcaatcccacccgctaaagtacttggagcggtctctccctccctcatcagcccaccaaaccaaacctagcctccaagagtgggaagaaattaaagcaagataggctattaagtgcagagggagagaaaatgcctccaacatgtgaggaagtaatgagagaaatcatagaattttaaggccatgatttaaggccatcatggccttaatcttccgcttcctcgctcactgactcgctgcgctcggtcgttcggctgcggcgagcggtatcagctcactcaaaggcggtaatacggttatccacagaatcaggggataacgcaggaaagaacatgtgagcaaaaggccagcaaaaggccaggaaccgtaaaaaggccgcgttgctggcgtttttccataggctccgcccccctgacgagcatcacaaaaatcgacgctcaagtcagaggtggcgaaacccgacaggactataaagataccaggcgtttccccctggaagctccctcgtgcgctctcctgttccgaccctgccgcttaccggatacctgtccgcctttctcccttcgggaagcgtggcgctttctcatagctcacgctgtaggtatctcagttcggtgtaggtcgttcgctccaagctgggctgtgtgcacgaaccccccgttcagcccgaccgctgcgccttatccggtaactatcgtcttgagtccaacccggtaagacacgacttatcgccactggcagcagccactggtaacaggattagcagagcgaggtatgtaggcggtgctacagagttcttgaagtggtggcctaactacggctacactagaagaacagtatttggtatctgcgctctgctgaagccagttaccttcggaaaaagagttggtagctcttgatccggcaaacaaaccaccgctggtagcggtggtttttttgtttgcaagcagcagattacgcgcagaaaaaaaggatctcaagaagatcctttgatcttttctacggggtctgacgctcagtggaacgaaaactcacgttaagggattttggtcatgagattatcaaaaaggatcttcacctagatccttttaaattaaaaatgaagttttaaatcaatctaaagtatatatgagtaaacttggtctgacagttaccaatgcttaatcagtgaggcacctatctcagcgatctgtctatttcgttcatccatagttgcctgactcggggggggggggcgctgaggtctgcctcgtgaagaaggtgttgctgactcataccaggcctgaatcgccccatcatccagccagaaagtgagggagccacggttgatgagagctttgttgtaggtggaccagttggtgattttgaacttttgctttgccacggaacggtctgcgttgtcgggaagatgcgtgatctgatccttcaactcagcaaaagttcgatttattcaacaaagccgccgtcccgtcaagtcagcgtaatgctctgccagtgttacaaccaattaaccaattctgattagaaaaactcatcgagcatcaaatgaaactgcaatttattcatatcaggattatcaataccatatttttgaaaaagccgtttctgtaatgaaggagaaaactcaccgaggcagttccataggatggcaagatcctggtatcggtctgcgattccgactcgtccaacatcaatacaacctattaatttcccctcgtcaaaaataaggttatcaagtgagaaatcaccatgagtgacgactgaatccggtgagaatggcaaaagcttatgcatttctttccagacttgttcaacaggccagccattacgctcgtcatcaaaatcactcgcatcaaccaaaccgttattcattcgtgattgcgcctgagcgagacgaaatacgcgatcgctgttaaaaggacaattacaaacaggaatcgaatgcaaccggcgcaggaacactgccagcgcatcaacaatattttcacctgaatcaggatattcttctaatacctggaatgctgttttcccggggatcgcagtggtgagtaaccatgcatcatcaggagtacggataaaatgcttgatggtcggaagaggcataaattccgtcagccagtttagtctgaccatctcatctgtaacatcattggcaacgctacctttgccatgtttcagaaacaactctggcgcatcgggcttcccatacaatcgatagattgtcgcacctgattgcccgacattatcgcgagcccatttatacccatataaatcagcatccatgttggaatttaatcgcggcctcgagcaagacgtttcccgttgaatatggctcataacaccccttgtattactgtttatgtaagcagacagttttattgttcatgatgatatatttttatcttgtgcaatgtaacatcagagattttgagacacaacgtggctttccccccccccccattattgaagcatttatcagggttattgtctcatgagcggatacatatttgaatgtatttagaaaaataaacaaataggggttccgcgcacatttccccgaaaagtgccacctgacgtctaagaaaccattattatcatgacattaacctataaaaataggcgtatcacgaggccctttcgtc

SEQ ID NO: 118 - DNA, 6126 bp, Artificial Sequence
  Plasmid DNA: 54675
tcgcgcgtttcggtgatgacggtgaaaacctctgacacatgcagctcccggagacggtcacagcttgtctgtaagcggatgccgggagcagacaagcccgtcagggcgcgtcagcgggtgttggcgggtgtcggggctggcttaactatgcggcatcagagcagattgtactgagagtgcaccatatgcggtgtgaaataccgcacagatgcgtaaggagaaaataccgcatcagattggctattggccattgcatacgttgtatccatatcataatatgtacatttatattggctcatgtccaacattaccgccatgttgacattgattattgactagttattaatagtaatcaattacgggaacttccatagcccatatatggagttccgcgttacataacttacgggaatttccaaacctggctgaccgcccaacgacccccgcccattgacgtcaataatgacgtatgttcccatagtaacgccaatagggaacttccattgacgtcaatgggtggagtatttacggtaaactgcccacttgggaatttccaagtgtatcatatgccaagtacgccccctattgacgtcaatgacgggaacttccataagcttgcattatgcccagtacatgaccttatgggaatttcctacttggcagtacatctacgtattagtcatcgctattaccatggtgatgcggttttggcagtacatcaatgggcgtggatagcggtttgactcacgggaacttccaagtctccaccccattgacgtcaatgggagtttgttttgactcaccaaaatcaacgggaattcccaaaatgtcgtaacaactccgccccattgacgcaaatgggcggtaggcgtgtacggtgggaggtctatataagcagagctcgtttagtgaaccgtcagatcgcctggagacgccatccacgctgttttgacctccatagaagacaccgggaccgatccagcctccatcggctcgcatctctccttcacgcgcccgccgccctacctgaggccgccatccacgccggttgagtcgcgttctgccgcctcccgcctgtggtgcctcctgaactgcgtccgccgtctaggtaagtttaaagctcaggtcgagaccgggcctttgtccggcgctcccttggagcctacctagactcagccggctctccacgctttgcctgaccctgcttgctcaactctagttaacggtggagggcagtgtagtctgagcagtactcgttgctgccgcgcgcgccaccagacataatagctgacagactaacagactgttcctttccatgggtcttttctgcagtcaccgtcgtcgacacgtgtgatcagatatcgcggccgctctagagatatcgccaccatgatcgccatcatcatcattaccatcctggccaccacaggcaagagcgacaagatctgtatcggctaccacgccaacaatagcaccacccaggtggacacaatcctggagaagaacgtgaccgtgacacactctgtggagctgctggagaaccagaaggaggagcggttctgtaaggtgctgaacagagcccctctggatctgaggagctgtacaatcgagggctggattctgggcaaccccagatgtgatctgctgctgggcgatcagtggtggagctacatcgtggagagacccacagcccagaatggcatctgttaccccggcgtgctgaatgatgtggaggagctgaaggccctgatcggcagcggagagaaggtggagagattcgagatgttccccaagtctacatgggccggagtggatacaaatagcggcgtgtccagcgcctgtccttacaccaccggcagcagcttctacagaaacctgctgtggatcatcaagacccgcagcagcgcctatcctgtgatcaggggcacctacaacaacaccggcaaccagcccatcctgtacttttggggcgtgcaccaccctccagataccaacgagcagaacaccctgtacggcagcggcgacagatatgtgagaatgggcaccgagaggatgaatttcgccaagggccctgaaattgccgccagacctgccgtgaatggccagagaggccggatcgattactactggagcgtgctgaagcctggcgagacactgaacgtggagagcaacggcaatctgatcgccccttggtacgcctacagattcgtgtccaccgatagaaagggcgccgtgttcaagagcaacctgcccatcgagaactgtgatgccacctgtcagacaattgccggggtgctgaggaccaataagaccttccagaacgtgtcccctctgtggatcggcgagtgccctaagtatgtgaagagcgagagcctgagactggccacaggcctgagaaacatcccccagagagagaccagaggactgtttggagccatcgccggattcatcgagggaggatggaccggaatgatcgatggctggtacggctaccaccacgagaatagccagggctctggatatgccgccgatagagagtctacccagaaggccatcgacggcatcaccaacaaggtgaacagcatcatcgacaagatgaacacccagttcgaggccgtggatcacgagttcagcaacctggagcggagaatcgacaacctgaacaagaggatggaggacggctttctggatgtgtggacctacaatgccgagctgctgatcctgctggaaaacgagaggaccctggacatgcacgacgccaacgtgaagaacctgtacgagaaggtgaagagccagctgagagacaacgccaacgatctgggcaatggctgcttcgagttctggcacaagtgtgacaacgactgtatcgagagcgtgaagaacggcacctataactaccccaagtaccaggccgagagcagactgaacaggcagaccatcgagtctgtgaagctggagaatctgggcgtgtatcagatcctggccatctacagcacagtgccttctagcctggtgctggtgggactgattctggccatgggagtgtggatgtgtagcaacggcagcatgcagtgccggatctgtatctgatgaacacgtgggatccagatctgctgtgccttctagttgccagccatctgttgtttgcccctcccccgtgccttccttgaccctggaaggtgccactcccactgtcctttcctaataaaatgaggaaattgcatcgcattgtctgagtaggtgtcattctattctggggggtggggtggggcaggacagcaagggggaggattgggaagacaatagcaggcatgctggggatgcggtgggctctatgggtacccaggtgctgaagaattgacccggttcctcctgggccagaaagaagcaggcacatccccttctctgtgacacaccctgtccacgcccctggttcttagttccagccccactcataggacactcatagctcaggagggctccgccttcaatcccacccgctaaagtacttggagcggtctctccctccctcatcagcccaccaaaccaaacctagcctccaagagtgggaagaaattaaagcaagataggctattaagtgcagagggagagaaaatgcctccaacatgtgaggaagtaatgagagaaatcatagaattttaaggccatgatttaaggccatcatggccttaatcttccgcttcctcgctcactgactcgctgcgctcggtcgttcggctgcggcgagcggtatcagctcactcaaaggcggtaatacggttatccacagaatcaggggataacgcaggaaagaacatgtgagcaaaaggccagcaaaaggccaggaaccgtaaaaaggccgcgttgctggcgtttttccataggctccgcccccctgacgagcatcacaaaaatcgacgctcaagtcagaggtggcgaaacccgacaggactataaagataccaggcgtttccccctggaagctccctcgtgcgctctcctgttccgaccctgccgcttaccggatacctgtccgcctttctcccttcgggaagcgtggcgctttctcatagctcacgctgtaggtatctcagttcggtgtaggtcgttcgctccaagctgggctgtgtgcacgaaccccccgttcagcccgaccgctgcgccttatccggtaactatcgtcttgagtccaacccggtaagacacgacttatcgccactggcagcagccactggtaacaggattagcagagcgaggtatgtaggcggtgctacagagttcttgaagtggtggcctaactacggctacactagaagaacagtatttggtatctgcgctctgctgaagccagttaccttcggaaaaagagttggtagctcttgatccggcaaacaaaccaccgctggtagcggtggtttttttgtttgcaagcagcagattacgcgcagaaaaaaaggatctcaagaagatcctttgatcttttctacggggtctgacgctcagtggaacgaaaactcacgttaagggattttggtcatgagattatcaaaaaggatcttcacctagatccttttaaattaaaaatgaagttttaaatcaatctaaagtatatatgagtaaacttggtctgacagttaccaatgcttaatcagtgaggcacctatctcagcgatctgtctatttcgttcatccatagttgcctgactcggggggggggggcgctgaggtctgcctcgtgaagaaggtgttgctgactcataccaggcctgaatcgccccatcatccagccagaaagtgagggagccacggttgatgagagctttgttgtaggtggaccagttggtgattttgaacttttgctttgccacggaacggtctgcgttgtcgggaagatgcgtgatctgatccttcaactcagcaaaagttcgatttattcaacaaagccgccgtcccgtcaagtcagcgtaatgctctgccagtgttacaaccaattaaccaattctgattagaaaaactcatcgagcatcaaatgaaactgcaatttattcatatcaggattatcaataccatatttttgaaaaagccgtttctgtaatgaaggagaaaactcaccgaggcagttccataggatggcaagatcctggtatcggtctgcgattccgactcgtccaacatcaatacaacctattaatttcccctcgtcaaaaataaggttatcaagtgagaaatcaccatgagtgacgactgaatccggtgagaatggcaaaagcttatgcatttctttccagacttgttcaacaggccagccattacgctcgtcatcaaaatcactcgcatcaaccaaaccgttattcattcgtgattgcgcctgagcgagacgaaatacgcgatcgctgttaaaaggacaattacaaacaggaatcgaatgcaaccggcgcaggaacactgccagcgcatcaacaatattttcacctgaatcaggatattcttctaatacctggaatgctgttttcccggggatcgcagtggtgagtaaccatgcatcatcaggagtacggataaaatgcttgatggtcggaagaggcataaattccgtcagccagtttagtctgaccatctcatctgtaacatcattggcaacgctacctttgccatgtttcagaaacaactctggcgcatcgggcttcccatacaatcgatagattgtcgcacctgattgcccgacattatcgcgagcccatttatacccatataaatcagcatccatgttggaatttaatcgcggcctcgagcaagacgtttcccgttgaatatggctcataacaccccttgtattactgtttatgtaagcagacagttttattgttcatgatgatatatttttatcttgtgcaatgtaacatcagagattttgagacacaacgtggctttccccccccccccattattgaagcatttatcagggttattgtctcatgagcggatacatatttgaatgtatttagaaaaataaacaaataggggttccgcgcacatttccccgaaaagtgccacctgacgtctaagaaaccattattatcatgacattaacctataaaaataggcgtatcacgaggccctttcgtc

SEQ ID NO: 119 - DNA, 6114 bp, Artificial Sequence
  Plasmid DNA: 54678
tcgcgcgtttcggtgatgacggtgaaaacctctgacacatgcagctcccggagacggtcacagcttgtctgtaagcggatgccgggagcagacaagcccgtcagggcgcgtcagcgggtgttggcgggtgtcggggctggcttaactatgcggcatcagagcagattgtactgagagtgcaccatatgcggtgtgaaataccgcacagatgcgtaaggagaaaataccgcatcagattggctattggccattgcatacgttgtatccatatcataatatgtacatttatattggctcatgtccaacattaccgccatgttgacattgattattgactagttattaatagtaatcaattacgggaacttccatagcccatatatggagttccgcgttacataacttacgggaatttccaaacctggctgaccgcccaacgacccccgcccattgacgtcaataatgacgtatgttcccatagtaacgccaatagggaacttccattgacgtcaatgggtggagtatttacggtaaactgcccacttgggaatttccaagtgtatcatatgccaagtacgccccctattgacgtcaatgacgggaacttccataagcttgcattatgcccagtacatgaccttatgggaatttcctacttggcagtacatctacgtattagtcatcgctattaccatggtgatgcggttttggcagtacatcaatgggcgtggatagcggtttgactcacgggaacttccaagtctccaccccattgacgtcaatgggagtttgttttgactcaccaaaatcaacgggaattcccaaaatgtcgtaacaactccgccccattgacgcaaatgggcggtaggcgtgtacggtgggaggtctatataagcagagctcgtttagtgaaccgtcagatcgcctggagacgccatccacgctgttttgacctccatagaagacaccgggaccgatccagcctccatcggctcgcatctctccttcacgcgcccgccgccctacctgaggccgccatccacgccggttgagtcgcgttctgccgcctcccgcctgtggtgcctcctgaactgcgtccgccgtctaggtaagtttaaagctcaggtcgagaccgggcctttgtccggcgctcccttggagcctacctagactcagccggctctccacgctttgcctgaccctgcttgctcaactctagttaacggtggagggcagtgtagtctgagcagtactcgttgctgccgcgcgcgccaccagacataatagctgacagactaacagactgttcctttccatgggtcttttctgcagtcaccgtcgtcgacacgtgtgatcagatatcgcggccgctctagagatatcgccaccatggccatcatctacctgatcctgctgtttacagctgtgagaggcgaccagatctgtatcggctaccacgccaacaatagcaccgagaaggtggacaccatcctggagagaaacgtgacagtgacccacgccaaggacatcctggaaaagacccacaacggcaagctgtgtaagctgaacggcatccctcctctggaactgggcgattgttctatcgccggatggctgctgggaaaccccgagtgtgataggctgctgtctgtgcctgagtggagctacatcatggagaaggagaaccctagggacggcctgtgttaccctggcagcttcaacgattacgaggagctgaagcacctgctgtctagcgtgaagcacttcgagaaggtgaagatcctgcccaaggacagatggacccagcacacaacaacaggaggaagcagagcctgcgccgtgtctggcaaccccagcttcttccggaatatggtgtggctgaccaagaagggcagcaattaccctgtggcccagggcagctacaataataccagcggcgagcagatgctgatcatctggggagtgcaccaccctaatgacgagaccgagcagagaaccctgtaccagaatgtgggcacctacgtgtctgtgggcaccagcaccctgaataagagaagcacccccgagattgccacaagacccaaggtgaacggccagggaggaagaatggagttcagctggaccctgctggatatgtgggacaccatcaactttgagagcaccggcaatctgatcgcccctgagtacggcttcaagatcagcaagagaggcagcagcggcatcatgaaaaccgagggcaccctggagaattgtgagaccaagtgccagacacctctgggcgccatcaataccaccctgcccttccacaatgtgcaccctctgaccatcggcgagtgccctaagtatgtgaagagcgagaagctggtgctggccacaggactgagaaacgtgccccagagagagacaagaggcctgtttggagccatcgccggattcatcgagggaggatggcagggaatggtcgatggctggtacggctaccaccacagcaatgatcagggctctggctatgccgccgataaggagtctacccagaaggcctttgacggcatcaccaacaaggtgaacagcgtgatcgagaagatgaacacccagtttgaggctgtgggcaaggagtttagcaacctggagcggagactggagaacctgaacaagaagatggaggacggcttcctggatgtgtggacctacaatgccgaactgctggtgctgatggagaatgagcggaccctggacttccacgacagcaacgtgaagaacctgtacgacaaagtgaggatgcagctgagggacaacgtgaaggaactgggcaatggctgcttcgagttctaccacaagtgtgacgacgagtgtatgaactccgtgaagaacggcacctacgactaccctaagtacgaggaggagagcaagctgaaccggaacgagatcaagggcgtgaagctgtctagcatgggcgtgtatcagatcctggccatctatgccacagtggccggatctctgagcctggcaattatgatggctggaatcagcttctggatgtgctccaatggcagcctgcagtgccggatctgtatctgatgaacacgtgggatccagatctgctgtgccttctagttgccagccatctgttgtttgcccctcccccgtgccttccttgaccctggaaggtgccactcccactgtcctttcctaataaaatgaggaaattgcatcgcattgtctgagtaggtgtcattctattctggggggtggggtggggcaggacagcaagggggaggattgggaagacaatagcaggcatgctggggatgcggtgggctctatgggtacccaggtgctgaagaattgacccggttcctcctgggccagaaagaagcaggcacatccccttctctgtgacacaccctgtccacgcccctggttcttagttccagccccactcataggacactcatagctcaggagggctccgccttcaatcccacccgctaaagtacttggagcggtctctccctccctcatcagcccaccaaaccaaacctagcctccaagagtgggaagaaattaaagcaagataggctattaagtgcagagggagagaaaatgcctccaacatgtgaggaagtaatgagagaaatcatagaattttaaggccatgatttaaggccatcatggccttaatcttccgcttcctcgctcactgactcgctgcgctcggtcgttcggctgcggcgagcggtatcagctcactcaaaggcggtaatacggttatccacagaatcaggggataacgcaggaaagaacatgtgagcaaaaggccagcaaaaggccaggaaccgtaaaaaggccgcgttgctggcgtttttccataggctccgcccccctgacgagcatcacaaaaatcgacgctcaagtcagaggtggcgaaacccgacaggactataaagataccaggcgtttccccctggaagctccctcgtgcgctctcctgttccgaccctgccgcttaccggatacctgtccgcctttctcccttcgggaagcgtggcgctttctcatagctcacgctgtaggtatctcagttcggtgtaggtcgttcgctccaagctgggctgtgtgcacgaaccccccgttcagcccgaccgctgcgccttatccggtaactatcgtcttgagtccaacccggtaagacacgacttatcgccactggcagcagccactggtaacaggattagcagagcgaggtatgtaggcggtgctacagagttcttgaagtggtggcctaactacggctacactagaagaacagtatttggtatctgcgctctgctgaagccagttaccttcggaaaaagagttggtagctcttgatccggcaaacaaaccaccgctggtagcggtggtttttttgtttgcaagcagcagattacgcgcagaaaaaaaggatctcaagaagatcctttgatcttttctacggggtctgacgctcagtggaacgaaaactcacgttaagggattttggtcatgagattatcaaaaaggatcttcacctagatccttttaaattaaaaatgaagttttaaatcaatctaaagtatatatgagtaaacttggtctgacagttaccaatgcttaatcagtgaggcacctatctcagcgatctgtctatttcgttcatccatagttgcctgactcggggggggggggcgctgaggtctgcctcgtgaagaaggtgttgctgactcataccaggcctgaatcgccccatcatccagccagaaagtgagggagccacggttgatgagagctttgttgtaggtggaccagttggtgattttgaacttttgctttgccacggaacggtctgcgttgtcgggaagatgcgtgatctgatccttcaactcagcaaaagttcgatttattcaacaaagccgccgtcccgtcaagtcagcgtaatgctctgccagtgttacaaccaattaaccaattctgattagaaaaactcatcgagcatcaaatgaaactgcaatttattcatatcaggattatcaataccatatttttgaaaaagccgtttctgtaatgaaggagaaaactcaccgaggcagttccataggatggcaagatcctggtatcggtctgcgattccgactcgtccaacatcaatacaacctattaatttcccctcgtcaaaaataaggttatcaagtgagaaatcaccatgagtgacgactgaatccggtgagaatggcaaaagcttatgcatttctttccagacttgttcaacaggccagccattacgctcgtcatcaaaatcactcgcatcaaccaaaccgttattcattcgtgattgcgcctgagcgagacgaaatacgcgatcgctgttaaaaggacaattacaaacaggaatcgaatgcaaccggcgcaggaacactgccagcgcatcaacaatattttcacctgaatcaggatattcttctaatacctggaatgctgttttcccggggatcgcagtggtgagtaaccatgcatcatcaggagtacggataaaatgcttgatggtcggaagaggcataaattccgtcagccagtttagtctgaccatctcatctgtaacatcattggcaacgctacctttgccatgtttcagaaacaactctggcgcatcgggcttcccatacaatcgatagattgtcgcacctgattgcccgacattatcgcgagcccatttatacccatataaatcagcatccatgttggaatttaatcgcggcctcgagcaagacgtttcccgttgaatatggctcataacaccccttgtattactgtttatgtaagcagacagttttattgttcatgatgatatatttttatcttgtgcaatgtaacatcagagattttgagacacaacgtggctttccccccccccccattattgaagcatttatcagggttattgtctcatgagcggatacatatttgaatgtatttagaaaaataaacaaataggggttccgcgcacatttccccgaaaagtgccacctgacgtctaagaaaccattattatcatgacattaacctataaaaataggcgtatcacgaggccctttcgtc

SEQ ID NO: 120 - DNA, 6123 bp, Artificial Sequence
  Plasmid DNA: 54679
tcgcgcgtttcggtgatgacggtgaaaacctctgacacatgcagctcccggagacggtcacagcttgtctgtaagcggatgccgggagcagacaagcccgtcagggcgcgtcagcgggtgttggcgggtgtcggggctggcttaactatgcggcatcagagcagattgtactgagagtgcaccatatgcggtgtgaaataccgcacagatgcgtaaggagaaaataccgcatcagattggctattggccattgcatacgttgtatccatatcataatatgtacatttatattggctcatgtccaacattaccgccatgttgacattgattattgactagttattaatagtaatcaattacgggaacttccatagcccatatatggagttccgcgttacataacttacgggaatttccaaacctggctgaccgcccaacgacccccgcccattgacgtcaataatgacgtatgttcccatagtaacgccaatagggaacttccattgacgtcaatgggtggagtatttacggtaaactgcccacttgggaatttccaagtgtatcatatgccaagtacgccccctattgacgtcaatgacgggaacttccataagcttgcattatgcccagtacatgaccttatgggaatttcctacttggcagtacatctacgtattagtcatcgctattaccatggtgatgcggttttggcagtacatcaatgggcgtggatagcggtttgactcacgggaacttccaagtctccaccccattgacgtcaatgggagtttgttttgactcaccaaaatcaacgggaattcccaaaatgtcgtaacaactccgccccattgacgcaaatgggcggtaggcgtgtacggtgggaggtctatataagcagagctcgtttagtgaaccgtcagatcgcctggagacgccatccacgctgttttgacctccatagaagacaccgggaccgatccagcctccatcggctcgcatctctccttcacgcgcccgccgccctacctgaggccgccatccacgccggttgagtcgcgttctgccgcctcccgcctgtggtgcctcctgaactgcgtccgccgtctaggtaagtttaaagctcaggtcgagaccgggcctttgtccggcgctcccttggagcctacctagactcagccggctctccacgctttgcctgaccctgcttgctcaactctagttaacggtggagggcagtgtagtctgagcagtactcgttgctgccgcgcgcgccaccagacataatagctgacagactaacagactgttcctttccatgggtcttttctgcagtcaccgtcgtcgacacgtgtgatcagatatcgcggccgctctagagatatcgccaccatggagaaaaccctgctgttcgccaccatctttctgtgtgtgaaggccgacgagatctgtatcggctacctgagcaacaacagcaccgacaaggtggacaccatcatcgagaacaacgtgaccgtgacaagctctgtggaactggtggagacagagcacaccggcagcttttgtagcatcaacggcaagcagcctatctctctgggcgattgctctttcgccggatggattctgggcaaccccatgtgtgatgacctgatcggcaagaccagctggagctacatcgtggagaagcccaaccctaccaacggcatctgttaccctggcatcctggagaatgaggaggagctgaggctgaagtttagcggcgtgctggagttcaataagttcgaggccttcaccagcaatggatggggagccgtgaattctggagccggagtgacagccgcctgtaagttcggcagcagcaacagcttcttccggaacatgatctggctgatccaccagagcggcacataccccgtgatcaagcggaccttcaacaacaccaagggcagggatgtgctggtggtgtggggaattcaccaccctgccaccctgaaagaacaccaggacctgtacaaaaaggacagcagctatgtggctgtgggcagcgagacctacaacaggagattcacccccgagatcagcacaagacccaaggtgaacggacaggccggaaggatgaccttctactggaccatcgtgaagcctggcgagagcatcaccttcgagagcaatggagcctttctggcccctagatacgccttcgagatcgtgtctgtgggcaatggcaagctgttccggagcgagctgaatatcgagagctgctccaccaagtgtcagacagaagtgggcggcatcaacaccaacaagagcttccacagcgtgcacagaaacaccatcggcgactgccccaagtacgtgaacgtgaagagcctgaagctggccacaggcctgagaaatgtgccccagagagagaccagaggactgtttggagccatcgccggattcatcgaaggaggatggcctggcctgatcaatggctggtacggcttccagcacagaaatgaggagggcacaggcattgccgccgataaggagtctacccagaaggccatcgaccagatcaccagcaaggtgaacaacatcgtggaccggatgaacaccaacttcgagagcgtgcagcacgagtttagcgagatcgaggagcggatcaacagactgagcaagcatgtggacgatagcgtggtggacatctggagctataacgcccagctgctggtgctgctggagaacgaaaagaccctggacctgcacgacagcaatgtgaggaacctgcacgagcgcgtgaggagaatgctgaaggacaacgccaaggatgagggcaatggctgcttcaccttctaccacaagtgtgacaacgagtgtatcgagaaagtgaggaacggcacctacgaccacaaggagttcgagaaggagagcaagatcaaccggcaggagatcgagggagtcaagctggatagcagcggcaacgtgtacaagatcctgagcatctacagctgtatcgccagctctctggtgctggccgccctgatcatgggctttatcctgtgggcctgtagcaatggctcctgccggtgtaccatctgtatctgatgaacacgtgggatccagatctgctgtgccttctagttgccagccatctgttgtttgcccctcccccgtgccttccttgaccctggaaggtgccactcccactgtcctttcctaataaaatgaggaaattgcatcgcattgtctgagtaggtgtcattctattctggggggtggggtggggcaggacagcaagggggaggattgggaagacaatagcaggcatgctggggatgcggtgggctctatgggtacccaggtgctgaagaattgacccggttcctcctgggccagaaagaagcaggcacatccccttctctgtgacacaccctgtccacgcccctggttcttagttccagccccactcataggacactcatagctcaggagggctccgccttcaatcccacccgctaaagtacttggagcggtctctccctccctcatcagcccaccaaaccaaacctagcctccaagagtgggaagaaattaaagcaagataggctattaagtgcagagggagagaaaatgcctccaacatgtgaggaagtaatgagagaaatcatagaattttaaggccatgatttaaggccatcatggccttaatcttccgcttcctcgctcactgactcgctgcgctcggtcgttcggctgcggcgagcggtatcagctcactcaaaggcggtaatacggttatccacagaatcaggggataacgcaggaaagaacatgtgagcaaaaggccagcaaaaggccaggaaccgtaaaaaggccgcgttgctggcgtttttccataggctccgcccccctgacgagcatcacaaaaatcgacgctcaagtcagaggtggcgaaacccgacaggactataaagataccaggcgtttccccctggaagctccctcgtgcgctctcctgttccgaccctgccgcttaccggatacctgtccgcctttctcccttcgggaagcgtggcgctttctcatagctcacgctgtaggtatctcagttcggtgtaggtcgttcgctccaagctgggctgtgtgcacgaaccccccgttcagcccgaccgctgcgccttatccggtaactatcgtcttgagtccaacccggtaagacacgacttatcgccactggcagcagccactggtaacaggattagcagagcgaggtatgtaggcggtgctacagagttcttgaagtggtggcctaactacggctacactagaagaacagtatttggtatctgcgctctgctgaagccagttaccttcggaaaaagagttggtagctcttgatccggcaaacaaaccaccgctggtagcggtggtttttttgtttgcaagcagcagattacgcgcagaaaaaaaggatctcaagaagatcctttgatcttttctacggggtctgacgctcagtggaacgaaaactcacgttaagggattttggtcatgagattatcaaaaaggatcttcacctagatccttttaaattaaaaatgaagttttaaatcaatctaaagtatatatgagtaaacttggtctgacagttaccaatgcttaatcagtgaggcacctatctcagcgatctgtctatttcgttcatccatagttgcctgactcggggggggggggcgctgaggtctgcctcgtgaagaaggtgttgctgactcataccaggcctgaatcgccccatcatccagccagaaagtgagggagccacggttgatgagagctttgttgtaggtggaccagttggtgattttgaacttttgctttgccacggaacggtctgcgttgtcgggaagatgcgtgatctgatccttcaactcagcaaaagttcgatttattcaacaaagccgccgtcccgtcaagtcagcgtaatgctctgccagtgttacaaccaattaaccaattctgattagaaaaactcatcgagcatcaaatgaaactgcaatttattcatatcaggattatcaataccatatttttgaaaaagccgtttctgtaatgaaggagaaaactcaccgaggcagttccataggatggcaagatcctggtatcggtctgcgattccgactcgtccaacatcaatacaacctattaatttcccctcgtcaaaaataaggttatcaagtgagaaatcaccatgagtgacgactgaatccggtgagaatggcaaaagcttatgcatttctttccagacttgttcaacaggccagccattacgctcgtcatcaaaatcactcgcatcaaccaaaccgttattcattcgtgattgcgcctgagcgagacgaaatacgcgatcgctgttaaaaggacaattacaaacaggaatcgaatgcaaccggcgcaggaacactgccagcgcatcaacaatattttcacctgaatcaggatattcttctaatacctggaatgctgttttcccggggatcgcagtggtgagtaaccatgcatcatcaggagtacggataaaatgcttgatggtcggaagaggcataaattccgtcagccagtttagtctgaccatctcatctgtaacatcattggcaacgctacctttgccatgtttcagaaacaactctggcgcatcgggcttcccatacaatcgatagattgtcgcacctgattgcccgacattatcgcgagcccatttatacccatataaatcagcatccatgttggaatttaatcgcggcctcgagcaagacgtttcccgttgaatatggctcataacaccccttgtattactgtttatgtaagcagacagttttattgttcatgatgatatatttttatcttgtgcaatgtaacatcagagattttgagacacaacgtggctttccccccccccccattattgaagcatttatcagggttattgtctcatgagcggatacatatttgaatgtatttagaaaaataaacaaataggggttccgcgcacatttccccgaaaagtgccacctgacgtctaagaaaccattattatcatgacattaacctataaaaataggcgtatcacgaggccctttcgtc

SEQ ID NO: 121 - DNA, 5922 bp, Artificial Sequence
  Plasmid DNA: 56383
tcgcgcgtttcggtgatgacggtgaaaacctctgacacatgcagctcccggagacggtcacagcttgtctgtaagcggatgccgggagcagacaagcccgtcagggcgcgtcagcgggtgttggcgggtgtcggggctggcttaactatgcggcatcagagcagattgtactgagagtgcaccatatgcggtgtgaaataccgcacagatgcgtaaggagaaaataccgcatcagattggctattggccattgcatacgttgtatccatatcataatatgtacatttatattggctcatgtccaacattaccgccatgttgacattgattattgactagttattaatagtaatcaattacgggaacttccatagcccatatatggagttccgcgttacataacttacgggaatttccaaacctggctgaccgcccaacgacccccgcccattgacgtcaataatgacgtatgttcccatagtaacgccaatagggaacttccattgacgtcaatgggtggagtatttacggtaaactgcccacttgggaatttccaagtgtatcatatgccaagtacgccccctattgacgtcaatgacgggaacttccataagcttgcattatgcccagtacatgaccttatgggaatttcctacttggcagtacatctacgtattagtcatcgctattaccatggtgatgcggttttggcagtacatcaatgggcgtggatagcggtttgactcacgggaacttccaagtctccaccccattgacgtcaatgggagtttgttttgactcaccaaaatcaacgggaattcccaaaatgtcgtaacaactccgccccattgacgcaaatgggcggtaggcgtgtacggtgggaggtctatataagcagagctcgtttagtgaaccgtcagatcgcctggagacgccatccacgctgttttgacctccatagaagacaccgggaccgatccagcctccatcggctcgcatctctccttcacgcgcccgccgccctacctgaggccgccatccacgccggttgagtcgcgttctgccgcctcccgcctgtggtgcctcctgaactgcgtccgccgtctaggtaagtttaaagctcaggtcgagaccgggcctttgtccggcgctcccttggagcctacctagactcagccggctctccacgctttgcctgaccctgcttgctcaactctagttaacggtggagggcagtgtagtctgagcagtactcgttgctgccgcgcgcgccaccagacataatagctgacagactaacagactgttcctttccatgggtcttttctgcagtcaccgtcgtcgacacgtgtgatcagatatcgcggccgctctagagatatcgccaccatggcctctcagggcaccaagagaagctacgagcagatggaaaccgatggcgagagacagaatgccaccgagatcagagcctctgtgggcaagatgatcggcggcatcggcagattctacatccagatgtgcaccgagctgaagctgtctgactacgagggcaggctgatccagaatagcctgaccatcgagagaatggtgctgtccgccttcgacgagagaagaaacaagtacctggaagagcaccctagcgccggaaaagaccccaagaaaaccggcggacccatctatagaagggtgaacggcaagtggatgagagagctgatcctgtacgacaaagaagagatcaggcggatttggcggcaggccaacaatggcgatgatgccacagccggactgacccacatgatgatctggcacagcaacctgaacgatgccacctaccagagaacaagggccctggtgagaactggaatggaccccagaatgtgctctctgatgcagggcagcacactgcctagaagatctggcgctgctggggctgctgtgaagggagtgggcaccatggtgatggaactggtgcggatgatcaagaggggcatcaacgacagaaatttttggcggggagagaacggcagaaagaccagaatcgcctacgagcggatgtgcaacatcctgaagggcaagtttcagacagccgcccagaaagccatgatggatcaggtgcgcgagagcagaaatcctggcaacgccgagttcgaggacctgacctttctggctagaagcgccctgattctgagaggcagcgtggcccacaaatcttgtctgcccgcctgtgtgtatggacctgccgtggccagcggctacgattttgagagagagggctacagcctggtcggcatcgatcctttcaggctgctgcagaacagccaggtgtacagcctgattaggcccaatgagaaccctgcccacaagtctcagctggtgtggatggcctgtcattctgccgcctttgaggacctgagagtgctgtccttcatcaagggcacaaaggtgctgcctagaggcaagctgtctaccagaggcgtgcagatcgccagcaacgagaacatggaaaccatggaaagcagcaccctggaactgagaagcaggtactgggccatcagaacaagaagcggcggcaacaccaatcagcagagagcctctgccggacagatcagcatccagcccacctttagcgtgcagagaaacctgcccttcgaccggacaacaatcatggccgccttcaacggcaataccgagggcagaaccagcgatatgcggaccgagatcatcaggatgatggaaagcgccagacccgaggacgtgtcttttcagggcagaggcgtgttcgagctgtctgatgagaaagccgccagccctatcgtgcctagcttcgacatgagcaacgagggcagctacttcttcggcgacaacgccgaagagtacgacaactgatgaacacgtgggatccagatctgctgtgccttctagttgccagccatctgttgtttgcccctcccccgtgccttccttgaccctggaaggtgccactcccactgtcctttcctaataaaatgaggaaattgcatcgcattgtctgagtaggtgtcattctattctggggggtggggtggggcaggacagcaagggggaggattgggaagacaatagcaggcatgctggggatgcggtgggctctatgggtacccaggtgctgaagaattgacccggttcctcctgggccagaaagaagcaggcacatccccttctctgtgacacaccctgtccacgcccctggttcttagttccagccccactcataggacactcatagctcaggagggctccgccttcaatcccacccgctaaagtacttggagcggtctctccctccctcatcagcccaccaaaccaaacctagcctccaagagtgggaagaaattaaagcaagataggctattaagtgcagagggagagaaaatgcctccaacatgtgaggaagtaatgagagaaatcatagaattttaaggccatgatttaaggccatcatggccttaatcttccgcttcctcgctcactgactcgctgcgctcggtcgttcggctgcggcgagcggtatcagctcactcaaaggcggtaatacggttatccacagaatcaggggataacgcaggaaagaacatgtgagcaaaaggccagcaaaaggccaggaaccgtaaaaaggccgcgttgctggcgtttttccataggctccgcccccctgacgagcatcacaaaaatcgacgctcaagtcagaggtggcgaaacccgacaggactataaagataccaggcgtttccccctggaagctccctcgtgcgctctcctgttccgaccctgccgcttaccggatacctgtccgcctttctcccttcgggaagcgtggcgctttctcatagctcacgctgtaggtatctcagttcggtgtaggtcgttcgctccaagctgggctgtgtgcacgaaccccccgttcagcccgaccgctgcgccttatccggtaactatcgtcttgagtccaacccggtaagacacgacttatcgccactggcagcagccactggtaacaggattagcagagcgaggtatgtaggcggtgctacagagttcttgaagtggtggcctaactacggctacactagaagaacagtatttggtatctgcgctctgctgaagccagttaccttcggaaaaagagttggtagctcttgatccggcaaacaaaccaccgctggtagcggtggtttttttgtttgcaagcagcagattacgcgcagaaaaaaaggatctcaagaagatcctttgatcttttctacggggtctgacgctcagtggaacgaaaactcacgttaagggattttggtcatgagattatcaaaaaggatcttcacctagatccttttaaattaaaaatgaagttttaaatcaatctaaagtatatatgagtaaacttggtctgacagttaccaatgcttaatcagtgaggcacctatctcagcgatctgtctatttcgttcatccatagttgcctgactcggggggggggggcgctgaggtctgcctcgtgaagaaggtgttgctgactcataccaggcctgaatcgccccatcatccagccagaaagtgagggagccacggttgatgagagctttgttgtaggtggaccagttggtgattttgaacttttgctttgccacggaacggtctgcgttgtcgggaagatgcgtgatctgatccttcaactcagcaaaagttcgatttattcaacaaagccgccgtcccgtcaagtcagcgtaatgctctgccagtgttacaaccaattaaccaattctgattagaaaaactcatcgagcatcaaatgaaactgcaatttattcatatcaggattatcaataccatatttttgaaaaagccgtttctgtaatgaaggagaaaactcaccgaggcagttccataggatggcaagatcctggtatcggtctgcgattccgactcgtccaacatcaatacaacctattaatttcccctcgtcaaaaataaggttatcaagtgagaaatcaccatgagtgacgactgaatccggtgagaatggcaaaagcttatgcatttctttccagacttgttcaacaggccagccattacgctcgtcatcaaaatcactcgcatcaaccaaaccgttattcattcgtgattgcgcctgagcgagacgaaatacgcgatcgctgttaaaaggacaattacaaacaggaatcgaatgcaaccggcgcaggaacactgccagcgcatcaacaatattttcacctgaatcaggatattcttctaatacctggaatgctgttttcccggggatcgcagtggtgagtaaccatgcatcatcaggagtacggataaaatgcttgatggtcggaagaggcataaattccgtcagccagtttagtctgaccatctcatctgtaacatcattggcaacgctacctttgccatgtttcagaaacaactctggcgcatcgggcttcccatacaatcgatagattgtcgcacctgattgcccgacattatcgcgagcccatttatacccatataaatcagcatccatgttggaatttaatcgcggcctcgagcaagacgtttcccgttgaatatggctcataacaccccttgtattactgtttatgtaagcagacagttttattgttcatgatgatatatttttatcttgtgcaatgtaacatcagagattttgagacacaacgtggctttccccccccccccattattgaagcatttatcagggttattgtctcatgagcggatacatatttgaatgtatttagaaaaataaacaaataggggttccgcgcacatttccccgaaaagtgccacctgacgtctaagaaaccattattatcatgacattaacctataaaaataggcgtatcacgaggccctttcgtc

SEQ ID NO: 122 - DNA, 4719 bp, Artificial Sequence
  Plasmid DNA: 56384
tcgcgcgtttcggtgatgacggtgaaaacctctgacacatgcagctcccggagacggtcacagcttgtctgtaagcggatgccgggagcagacaagcccgtcagggcgcgtcagcgggtgttggcgggtgtcggggctggcttaactatgcggcatcagagcagattgtactgagagtgcaccatatgcggtgtgaaataccgcacagatgcgtaaggagaaaataccgcatcagattggctattggccattgcatacgttgtatccatatcataatatgtacatttatattggctcatgtccaacattaccgccatgttgacattgattattgactagttattaatagtaatcaattacgggaacttccatagcccatatatggagttccgcgttacataacttacgggaatttccaaacctggctgaccgcccaacgacccccgcccattgacgtcaataatgacgtatgttcccatagtaacgccaatagggaacttccattgacgtcaatgggtggagtatttacggtaaactgcccacttgggaatttccaagtgtatcatatgccaagtacgccccctattgacgtcaatgacgggaacttccataagcttgcattatgcccagtacatgaccttatgggaatttcctacttggcagtacatctacgtattagtcatcgctattaccatggtgatgcggttttggcagtacatcaatgggcgtggatagcggtttgactcacgggaacttccaagtctccaccccattgacgtcaatgggagtttgttttgactcaccaaaatcaacgggaattcccaaaatgtcgtaacaactccgccccattgacgcaaatgggcggtaggcgtgtacggtgggaggtctatataagcagagctcgtttagtgaaccgtcagatcgcctggagacgccatccacgctgttttgacctccatagaagacaccgggaccgatccagcctccatcggctcgcatctctccttcacgcgcccgccgccctacctgaggccgccatccacgccggttgagtcgcgttctgccgcctcccgcctgtggtgcctcctgaactgcgtccgccgtctaggtaagtttaaagctcaggtcgagaccgggcctttgtccggcgctcccttggagcctacctagactcagccggctctccacgctttgcctgaccctgcttgctcaactctagttaacggtggagggcagtgtagtctgagcagtactcgttgctgccgcgcgcgccaccagacataatagctgacagactaacagactgttcctttccatgggtcttttctgcagtcaccgtcgtcgacacgtgtgatcagatatcgcggccgctctagagatatcgccaccatgagcctgctgaccgaggtggaaacccccatcagaaatgagtggggctgcagatgtaatggcagcagcgaccctctgacaatcgccgccaacatcatcggaatcctgcacctgaccctgtggattctggaccggctgttcttcaagtgcatctaccggcggtttaagtatggcctgaagggcggaccttctacagaaggcgtgcccaagagcatgcgggaagagtaccggaaagagcagcagtctgccgtcgatgccgatgatggccacttcgtgtccatcgagctggaatgatgaacacgtgggatccagatctgctgtgccttctagttgccagccatctgttgtttgcccctcccccgtgccttccttgaccctggaaggtgccactcccactgtcctttcctaataaaatgaggaaattgcatcgcattgtctgagtaggtgtcattctattctggggggtggggtggggcaggacagcaagggggaggattgggaagacaatagcaggcatgctggggatgcggtgggctctatgggtacccaggtgctgaagaattgacccggttcctcctgggccagaaagaagcaggcacatccccttctctgtgacacaccctgtccacgcccctggttcttagttccagccccactcataggacactcatagctcaggagggctccgccttcaatcccacccgctaaagtacttggagcggtctctccctccctcatcagcccaccaaaccaaacctagcctccaagagtgggaagaaattaaagcaagataggctattaagtgcagagggagagaaaatgcctccaacatgtgaggaagtaatgagagaaatcatagaattttaaggccatgatttaaggccatcatggccttaatcttccgcttcctcgctcactgactcgctgcgctcggtcgttcggctgcggcgagcggtatcagctcactcaaaggcggtaatacggttatccacagaatcaggggataacgcaggaaagaacatgtgagcaaaaggccagcaaaaggccaggaaccgtaaaaaggccgcgttgctggcgtttttccataggctccgcccccctgacgagcatcacaaaaatcgacgctcaagtcagaggtggcgaaacccgacaggactataaagataccaggcgtttccccctggaagctccctcgtgcgctctcctgttccgaccctgccgcttaccggatacctgtccgcctttctcccttcgggaagcgtggcgctttctcatagctcacgctgtaggtatctcagttcggtgtaggtcgttcgctccaagctgggctgtgtgcacgaaccccccgttcagcccgaccgctgcgccttatccggtaactatcgtcttgagtccaacccggtaagacacgacttatcgccactggcagcagccactggtaacaggattagcagagcgaggtatgtaggcggtgctacagagttcttgaagtggtggcctaactacggctacactagaagaacagtatttggtatctgcgctctgctgaagccagttaccttcggaaaaagagttggtagctcttgatccggcaaacaaaccaccgctggtagcggtggtttttttgtttgcaagcagcagattacgcgcagaaaaaaaggatctcaagaagatcctttgatcttttctacggggtctgacgctcagtggaacgaaaactcacgttaagggattttggtcatgagattatcaaaaaggatcttcacctagatccttttaaattaaaaatgaagttttaaatcaatctaaagtatatatgagtaaacttggtctgacagttaccaatgcttaatcagtgaggcacctatctcagcgatctgtctatttcgttcatccatagttgcctgactcggggggggggggcgctgaggtctgcctcgtgaagaaggtgttgctgactcataccaggcctgaatcgccccatcatccagccagaaagtgagggagccacggttgatgagagctttgttgtaggtggaccagttggtgattttgaacttttgctttgccacggaacggtctgcgttgtcgggaagatgcgtgatctgatccttcaactcagcaaaagttcgatttattcaacaaagccgccgtcccgtcaagtcagcgtaatgctctgccagtgttacaaccaattaaccaattctgattagaaaaactcatcgagcatcaaatgaaactgcaatttattcatatcaggattatcaataccatatttttgaaaaagccgtttctgtaatgaaggagaaaactcaccgaggcagttccataggatggcaagatcctggtatcggtctgcgattccgactcgtccaacatcaatacaacctattaatttcccctcgtcaaaaataaggttatcaagtgagaaatcaccatgagtgacgactgaatccggtgagaatggcaaaagcttatgcatttctttccagacttgttcaacaggccagccattacgctcgtcatcaaaatcactcgcatcaaccaaaccgttattcattcgtgattgcgcctgagcgagacgaaatacgcgatcgctgttaaaaggacaattacaaacaggaatcgaatgcaaccggcgcaggaacactgccagcgcatcaacaatattttcacctgaatcaggatattcttctaatacctggaatgctgttttcccggggatcgcagtggtgagtaaccatgcatcatcaggagtacggataaaatgcttgatggtcggaagaggcataaattccgtcagccagtttagtctgaccatctcatctgtaacatcattggcaacgctacctttgccatgtttcagaaacaactctggcgcatcgggcttcccatacaatcgatagattgtcgcacctgattgcccgacattatcgcgagcccatttatacccatataaatcagcatccatgttggaatttaatcgcggcctcgagcaagacgtttcccgttgaatatggctcataacaccccttgtattactgtttatgtaagcagacagttttattgttcatgatgatatatttttatcttgtgcaatgtaacatcagagattttgagacacaacgtggctttccccccccccccattattgaagcatttatcagggttattgtctcatgagcggatacatatttgaatgtatttagaaaaataaacaaataggggttccgcgcacatttccccgaaaagtgccacctgacgtctaagaaaccattattatcatgacattaacctataaaaataggcgtatcacgaggccctttcgtc

SEQ ID NO: 123 - DNA, 5922 bp, Artificial Sequence
  Plasmid DNA: 56478
tcgcgcgtttcggtgatgacggtgaaaacctctgacacatgcagctcccggagacggtcacagcttgtctgtaagcggatgccgggagcagacaagcccgtcagggcgcgtcagcgggtgttggcgggtgtcggggctggcttaactatgcggcatcagagcagattgtactgagagtgcaccatatgcggtgtgaaataccgcacagatgcgtaaggagaaaataccgcatcagattggctattggccattgcatacgttgtatccatatcataatatgtacatttatattggctcatgtccaacattaccgccatgttgacattgattattgactagttattaatagtaatcaattacgggaacttccatagcccatatatggagttccgcgttacataacttacgggaatttccaaacctggctgaccgcccaacgacccccgcccattgacgtcaataatgacgtatgttcccatagtaacgccaatagggaacttccattgacgtcaatgggtggagtatttacggtaaactgcccacttgggaatttccaagtgtatcatatgccaagtacgccccctattgacgtcaatgacgggaacttccataagcttgcattatgcccagtacatgaccttatgggaatttcctacttggcagtacatctacgtattagtcatcgctattaccatggtgatgcggttttggcagtacatcaatgggcgtggatagcggtttgactcacgggaacttccaagtctccaccccattgacgtcaatgggagtttgttttgactcaccaaaatcaacgggaattcccaaaatgtcgtaacaactccgccccattgacgcaaatgggcggtaggcgtgtacggtgggaggtctatataagcagagctcgtttagtgaaccgtcagatcgcctggagacgccatccacgctgttttgacctccatagaagacaccgggaccgatccagcctccatcggctcgcatctctccttcacgcgcccgccgccctacctgaggccgccatccacgccggttgagtcgcgttctgccgcctcccgcctgtggtgcctcctgaactgcgtccgccgtctaggtaagtttaaagctcaggtcgagaccgggcctttgtccggcgctcccttggagcctacctagactcagccggctctccacgctttgcctgaccctgcttgctcaactctagttaacggtggagggcagtgtagtctgagcagtactcgttgctgccgcgcgcgccaccagacataatagctgacagactaacagactgttcctttccatgggtcttttctgcagtcaccgtcgtcgacacgtgtgatcagatatcgcggccgctctagagatatcgccaccatggcctctcagggcaccaagagaagctacgagcagatggagaccgatggcgagagacagaatgccaccgagatcagagcctctgtgggcagaatgatcggcggcatcggcagattctacatccagatgtgcaccgagctgaagctgtctgactacgagggcaggctgatccagaacagcatcaccatcgagaggatggtgctgtccgccttcgacgagcggagaaacaagtacctggaggagcatccttctgccggaaaggaccccaagaaaaccggcggacccatctatagaaggatcgacggcaagtggatgagagagctgatcctgtacgacaaggaagagatccggcggatttggagacaggccaacaatggcgaagatgccacagccggactgacccacatgatgatctggcacagcaacctgaacgatgccacctaccagagaacaagggccctggtgagaactggaatggaccccaggatgtgctctctgatgcagggcagcacactgcctagaagatctggagccgctggagctgctgtgaagggagtgggcaccatggtgatggagctgatccggatgatcaagcggggcatcaacgaccggaatttctggagaggcgagaacggcagaagaaccaggatcgcctacgagcggatgtgcaacatcctgaagggcaagtttcagacagccgcccagagggctatgatggatcaggtgcgggagagcagaaatcctggcaacgccgagatcgaggacctgatcttcctggccagaagcgccctgattctgagaggaagcgtggcccacaagtcttgtctgcctgcctgtgtgtatggacctgccgtggccagcggctacgattttgagagggagggctatagcctggtgggcatcgacccttttaggctgctgcagaacagccaggtgtacagcctgattaggcccaatgagaaccctgcccacaaatctcagctggtgtggatggcctgtcattctgccgccttcgaggatctgagagtgagcagcttcatcaggggcacaagagtggtgcctagaggcaagctgtctaccagaggcgtgcagatcgccagcaacgagaacatggagaccatggacagctctaccctggagctgaggagcagatactgggccatcagaacaagaagcggcggcaacaccaatcagcagagagcctctgccggacagattagcgtgcagcccacattcagcgtgcagaggaacctgccttttgagcgggccacaatcatggccgccttcaccggcaatacagagggcagaaccagcgacatgcggaccgagatcatcaggatgatggagagcgccagacctgaggatgtgagctttcagggcagaggcgtgttcgagctgtctgatgagaaggccacctcccctatcgtgcccagcttcgacatgagcaacgagggcagctacttcttcggcgacaacgccgaggagtacgacaattgatgaacacgtgggatccagatctgctgtgccttctagttgccagccatctgttgtttgcccctcccccgtgccttccttgaccctggaaggtgccactcccactgtcctttcctaataaaatgaggaaattgcatcgcattgtctgagtaggtgtcattctattctggggggtggggtggggcaggacagcaagggggaggattgggaagacaatagcaggcatgctggggatgcggtgggctctatgggtacccaggtgctgaagaattgacccggttcctcctgggccagaaagaagcaggcacatccccttctctgtgacacaccctgtccacgcccctggttcttagttccagccccactcataggacactcatagctcaggagggctccgccttcaatcccacccgctaaagtacttggagcggtctctccctccctcatcagcccaccaaaccaaacctagcctccaagagtgggaagaaattaaagcaagataggctattaagtgcagagggagagaaaatgcctccaacatgtgaggaagtaatgagagaaatcatagaattttaaggccatgatttaaggccatcatggccttaatcttccgcttcctcgctcactgactcgctgcgctcggtcgttcggctgcggcgagcggtatcagctcactcaaaggcggtaatacggttatccacagaatcaggggataacgcaggaaagaacatgtgagcaaaaggccagcaaaaggccaggaaccgtaaaaaggccgcgttgctggcgtttttccataggctccgcccccctgacgagcatcacaaaaatcgacgctcaagtcagaggtggcgaaacccgacaggactataaagataccaggcgtttccccctggaagctccctcgtgcgctctcctgttccgaccctgccgcttaccggatacctgtccgcctttctcccttcgggaagcgtggcgctttctcatagctcacgctgtaggtatctcagttcggtgtaggtcgttcgctccaagctgggctgtgtgcacgaaccccccgttcagcccgaccgctgcgccttatccggtaactatcgtcttgagtccaacccggtaagacacgacttatcgccactggcagcagccactggtaacaggattagcagagcgaggtatgtaggcggtgctacagagttcttgaagtggtggcctaactacggctacactagaagaacagtatttggtatctgcgctctgctgaagccagttaccttcggaaaaagagttggtagctcttgatccggcaaacaaaccaccgctggtagcggtggtttttttgtttgcaagcagcagattacgcgcagaaaaaaaggatctcaagaagatcctttgatcttttctacggggtctgacgctcagtggaacgaaaactcacgttaagggattttggtcatgagattatcaaaaaggatcttcacctagatccttttaaattaaaaatgaagttttaaatcaatctaaagtatatatgagtaaacttggtctgacagttaccaatgcttaatcagtgaggcacctatctcagcgatctgtctatttcgttcatccatagttgcctgactcggggggggggggcgctgaggtctgcctcgtgaagaaggtgttgctgactcataccaggcctgaatcgccccatcatccagccagaaagtgagggagccacggttgatgagagctttgttgtaggtggaccagttggtgattttgaacttttgctttgccacggaacggtctgcgttgtcgggaagatgcgtgatctgatccttcaactcagcaaaagttcgatttattcaacaaagccgccgtcccgtcaagtcagcgtaatgctctgccagtgttacaaccaattaaccaattctgattagaaaaactcatcgagcatcaaatgaaactgcaatttattcatatcaggattatcaataccatatttttgaaaaagccgtttctgtaatgaaggagaaaactcaccgaggcagttccataggatggcaagatcctggtatcggtctgcgattccgactcgtccaacatcaatacaacctattaatttcccctcgtcaaaaataaggttatcaagtgagaaatcaccatgagtgacgactgaatccggtgagaatggcaaaagcttatgcatttctttccagacttgttcaacaggccagccattacgctcgtcatcaaaatcactcgcatcaaccaaaccgttattcattcgtgattgcgcctgagcgagacgaaatacgcgatcgctgttaaaaggacaattacaaacaggaatcgaatgcaaccggcgcaggaacactgccagcgcatcaacaatattttcacctgaatcaggatattcttctaatacctggaatgctgttttcccggggatcgcagtggtgagtaaccatgcatcatcaggagtacggataaaatgcttgatggtcggaagaggcataaattccgtcagccagtttagtctgaccatctcatctgtaacatcattggcaacgctacctttgccatgtttcagaaacaactctggcgcatcgggcttcccatacaatcgatagattgtcgcacctgattgcccgacattatcgcgagcccatttatacccatataaatcagcatccatgttggaatttaatcgcggcctcgagcaagacgtttcccgttgaatatggctcataacaccccttgtattactgtttatgtaagcagacagttttattgttcatgatgatatatttttatcttgtgcaatgtaacatcagagattttgagacacaacgtggctttccccccccccccattattgaagcatttatcagggttattgtctcatgagcggatacatatttgaatgtatttagaaaaataaacaaataggggttccgcgcacatttccccgaaaagtgccacctgacgtctaagaaaccattattatcatgacattaacctataaaaataggcgtatcacgaggccctttcgtc

SEQ ID NO: 124 - DNA, 4719 bp, Artificial Sequence
  Plasmid DNA: 56479
tcgcgcgtttcggtgatgacggtgaaaacctctgacacatgcagctcccggagacggtcacagcttgtctgtaagcggatgccgggagcagacaagcccgtcagggcgcgtcagcgggtgttggcgggtgtcggggctggcttaactatgcggcatcagagcagattgtactgagagtgcaccatatgcggtgtgaaataccgcacagatgcgtaaggagaaaataccgcatcagattggctattggccattgcatacgttgtatccatatcataatatgtacatttatattggctcatgtccaacattaccgccatgttgacattgattattgactagttattaatagtaatcaattacgggaacttccatagcccatatatggagttccgcgttacataacttacgggaatttccaaacctggctgaccgcccaacgacccccgcccattgacgtcaataatgacgtatgttcccatagtaacgccaatagggaacttccattgacgtcaatgggtggagtatttacggtaaactgcccacttgggaatttccaagtgtatcatatgccaagtacgccccctattgacgtcaatgacgggaacttccataagcttgcattatgcccagtacatgaccttatgggaatttcctacttggcagtacatctacgtattagtcatcgctattaccatggtgatgcggttttggcagtacatcaatgggcgtggatagcggtttgactcacgggaacttccaagtctccaccccattgacgtcaatgggagtttgttttgactcaccaaaatcaacgggaattcccaaaatgtcgtaacaactccgccccattgacgcaaatgggcggtaggcgtgtacggtgggaggtctatataagcagagctcgtttagtgaaccgtcagatcgcctggagacgccatccacgctgttttgacctccatagaagacaccgggaccgatccagcctccatcggctcgcatctctccttcacgcgcccgccgccctacctgaggccgccatccacgccggttgagtcgcgttctgccgcctcccgcctgtggtgcctcctgaactgcgtccgccgtctaggtaagtttaaagctcaggtcgagaccgggcctttgtccggcgctcccttggagcctacctagactcagccggctctccacgctttgcctgaccctgcttgctcaactctagttaacggtggagggcagtgtagtctgagcagtactcgttgctgccgcgcgcgccaccagacataatagctgacagactaacagactgttcctttccatgggtcttttctgcagtcaccgtcgtcgacacgtgtgatcagatatcgcggccgctctagagatatcgccaccatgagcctgctgacagaggtggagacccccaccagaaatgagtgggagtgcaggtgtagcgatagcagcgaccctattgtggtggccgccaacatcatcggaatcctgcacctgatcctgtggattctggaccggctgttcttcaagtgcatctaccggaggctgaagtacggactgaagagaggacctgccacagctggagtgcctgagagcatgcgggaggagtacagacaggaacagcagtctgccgtcgatgtggatgatggccacttcgtgaacatcgagctggagtgatgaacacgtgggatccagatctgctgtgccttctagttgccagccatctgttgtttgcccctcccccgtgccttccttgaccctggaaggtgccactcccactgtcctttcctaataaaatgaggaaattgcatcgcattgtctgagtaggtgtcattctattctggggggtggggtggggcaggacagcaagggggaggattgggaagacaatagcaggcatgctggggatgcggtgggctctatgggtacccaggtgctgaagaattgacccggttcctcctgggccagaaagaagcaggcacatccccttctctgtgacacaccctgtccacgcccctggttcttagttccagccccactcataggacactcatagctcaggagggctccgccttcaatcccacccgctaaagtacttggagcggtctctccctccctcatcagcccaccaaaccaaacctagcctccaagagtgggaagaaattaaagcaagataggctattaagtgcagagggagagaaaatgcctccaacatgtgaggaagtaatgagagaaatcatagaattttaaggccatgatttaaggccatcatggccttaatcttccgcttcctcgctcactgactcgctgcgctcggtcgttcggctgcggcgagcggtatcagctcactcaaaggcggtaatacggttatccacagaatcaggggataacgcaggaaagaacatgtgagcaaaaggccagcaaaaggccaggaaccgtaaaaaggccgcgttgctggcgtttttccataggctccgcccccctgacgagcatcacaaaaatcgacgctcaagtcagaggtggcgaaacccgacaggactataaagataccaggcgtttccccctggaagctccctcgtgcgctctcctgttccgaccctgccgcttaccggatacctgtccgcctttctcccttcgggaagcgtggcgctttctcatagctcacgctgtaggtatctcagttcggtgtaggtcgttcgctccaagctgggctgtgtgcacgaaccccccgttcagcccgaccgctgcgccttatccggtaactatcgtcttgagtccaacccggtaagacacgacttatcgccactggcagcagccactggtaacaggattagcagagcgaggtatgtaggcggtgctacagagttcttgaagtggtggcctaactacggctacactagaagaacagtatttggtatctgcgctctgctgaagccagttaccttcggaaaaagagttggtagctcttgatccggcaaacaaaccaccgctggtagcggtggtttttttgtttgcaagcagcagattacgcgcagaaaaaaaggatctcaagaagatcctttgatcttttctacggggtctgacgctcagtggaacgaaaactcacgttaagggattttggtcatgagattatcaaaaaggatcttcacctagatccttttaaattaaaaatgaagttttaaatcaatctaaagtatatatgagtaaacttggtctgacagttaccaatgcttaatcagtgaggcacctatctcagcgatctgtctatttcgttcatccatagttgcctgactcggggggggggggcgctgaggtctgcctcgtgaagaaggtgttgctgactcataccaggcctgaatcgccccatcatccagccagaaagtgagggagccacggttgatgagagctttgttgtaggtggaccagttggtgattttgaacttttgctttgccacggaacggtctgcgttgtcgggaagatgcgtgatctgatccttcaactcagcaaaagttcgatttattcaacaaagccgccgtcccgtcaagtcagcgtaatgctctgccagtgttacaaccaattaaccaattctgattagaaaaactcatcgagcatcaaatgaaactgcaatttattcatatcaggattatcaataccatatttttgaaaaagccgtttctgtaatgaaggagaaaactcaccgaggcagttccataggatggcaagatcctggtatcggtctgcgattccgactcgtccaacatcaatacaacctattaatttcccctcgtcaaaaataaggttatcaagtgagaaatcaccatgagtgacgactgaatccggtgagaatggcaaaagcttatgcatttctttccagacttgttcaacaggccagccattacgctcgtcatcaaaatcactcgcatcaaccaaaccgttattcattcgtgattgcgcctgagcgagacgaaatacgcgatcgctgttaaaaggacaattacaaacaggaatcgaatgcaaccggcgcaggaacactgccagcgcatcaacaatattttcacctgaatcaggatattcttctaatacctggaatgctgttttcccggggatcgcagtggtgagtaaccatgcatcatcaggagtacggataaaatgcttgatggtcggaagaggcataaattccgtcagccagtttagtctgaccatctcatctgtaacatcattggcaacgctacctttgccatgtttcagaaacaactctggcgcatcgggcttcccatacaatcgatagattgtcgcacctgattgcccgacattatcgcgagcccatttatacccatataaatcagcatccatgttggaatttaatcgcggcctcgagcaagacgtttcccgttgaatatggctcataacaccccttgtattactgtttatgtaagcagacagttttattgttcatgatgatatatttttatcttgtgcaatgtaacatcagagattttgagacacaacgtggctttccccccccccccattattgaagcatttatcagggttattgtctcatgagcggatacatatttgaatgtatttagaaaaataaacaaataggggttccgcgcacatttccccgaaaagtgccacctgacgtctaagaaaccattattatcatgacattaacctataaaaataggcgtatcacgaggccctttcgtc

SEQ ID NO: 125 - DNA, 6453 bp, Artificial Sequence
  Plasmid DNA: VRC 7700
tcgcgcgtttcggtgatgacggtgaaaacctctgacacatgcagctcccggagacggtcacagcttgtctgtaagcggatgccgggagcagacaagcccgtcagggcgcgtcagcgggtgttggcgggtgtcggggctggcttaactatgcggcatcagagcagattgtactgagagtgcaccatatgcggtgtgaaataccgcacagatgcgtaaggagaaaataccgcatcagattggctattggccattgcatacgttgtatccatatcataatatgtacatttatattggctcatgtccaacattaccgccatgttgacattgattattgactagttattaatagtaatcaattacggggtcattagttcatagcccatatatggagttccgcgttacataacttacggtaaatggcccgcctggctgaccgcccaacgacccccgcccattgacgtcaataatgacgtatgttcccatagtaacgccaatagggactttccattgacgtcaatgggtggagtatttacggtaaactgcccacttggcagtacatcaagtgtatcatatgccaagtacgccccctattgacgtcaatgacggtaaatggcccgcctggcattatgcccagtacatgaccttatgggactttcctacttggcagtacatctacgtattagtcatcgctattaccatggtgatgcggttttggcagtacatcaatgggcgtggatagcggtttgactcacggggatttccaagtctccaccccattgacgtcaatgggagtttgttttggcaccaaaatcaacgggactttccaaaatgtcgtaacaactccgccccattgacgcaaatgggcggtaggcgtgtacggtgggaggtctatataagcagagctcgtttagtgaaccgtcagatcgcctggagacgccatccacgctgttttgacctccatagaagacaccgggaccgatccagcctccgcggccgggaacggtgcattggaacgcggattccccgtgccaagagtgacgtaagtaccgcctatagactctataggcacacccctttggctcttatgcatgctatactgtttttggcttggggcctatacacccccgcttccttatgctataggtgatggtatagcttagcctataggtgtgggttattgaccattattgaccactcccctattggtgacgatactttccattactaatccataacatggctctttgccacaactatctctattggctatatgccaatactctgtccttcagagactgacacggactctgtatttttacaggatggggtcccatttattatttacaaattcacatatacaacaacgccgtcccccgtgcccgcagtttttattaaacatagcgtgggatctccacgcgaatctcgggtacgtgttccggacatgggctcttctccggtagcggcggagcttccacatccgagccctggtcccatgcctccagcggctcatggtcgctcggcagctccttgctcctaacagtggaggccagacttaggcacagcacaatgcccaccaccaccagtgtgccgcacaaggccgtggcggtagggtatgtgtctgaaaatgagcgtggagattgggctcgcacggctgacgcagatggaagacttaaggcagcggcagaagaagatgcaggcagctgagttgttgtattctgataagagtcagaggtaactcccgttgcggtgctgttaacggtggagggcagtgtagtctgagcagtactcgttgctgccgcgcgcgccaccagacataatagctgacagactaacagactgttcctttccatgggtcttttctgcagtcaccgtcgtcgacagcaaaagcagggtagataatcactcactgagtgacatcaaaatcatggcgtcccaaggcaccaaacggtcttacgaacagatggagactgatggagaacgccagaatgccactgaaatcagagcatccgtcggaaaaatgattggtggaattggacgattctacatccaaatgtgcaccgaactcaaactcagtgattatgagggacggttgatccaaaacagcttaacaatagagagaatggtgctctctgcttttgacgaaaggagaaataaatacctggaagaacatcccagtgcggggaaagatcctaagaaaactggaggacctatatacaggagagtaaacggaaagtggatgagagaactcatcctttatgacaaagaagaaataaggcgaatctggcgccaagctaataatggtgacgatgcaacggctggtctgactcacatgatgatctggcattccaatttgaatgatgcaacttatcagaggacaagagctcttgttcgcaccggaatggatcccaggatgtgctctctgatgcaaggttcaactctccctaggaggtctggagccgcaggtgctgcagtcaaaggagttggaacaatggtgatggaattggtcaggatgatcaaacgtgggatcaatgatcggaacttctggaggggtgagaatggacgaaaaacaagaattgcttatgaaagaatgtgcaacattctcaaagggaaatttcaaactgctgcacaaaaagcaatgatggatcaagtgagagagagccggaacccagggaatgctgagttcgaagatctcacttttctagcacggtctgcactcatattgagagggtcggttgctcacaagtcctgcctgcctgcctgtgtgtatggacctgccgtagccagtgggtacgactttgaaagggagggatactctctagtcggaatagaccctttcagactgcttcaaaacagccaagtgtacagcctaatcagaccaaatgagaatccagcacacaagagtcaactggtgtggatggcatgccattctgccgcatttgaagatctaagagtattaagcttcatcaaagggacgaaggtgctcccaagagggaagctttccactagaggagttcaaattgcttccaatgaaaatatggagactatggaatcaagtacacttgaactgagaagcaggtactgggccataaggaccagaagtggaggaaacaccaatcaacagagggcatctgcgggccaaatcagcatacaacctacgttctcagtacagagaaatctcccttttgacagaacaaccattatggcagcattcaatgggaatacagagggaagaacatctgacatgaggaccgaaatcataaggatgatggaaagtgcaagaccagaagatgtgtctttccaggggcggggagtcttcgagctctcggacgaaaaggcagcgagcccgatcgtgccttcctttgacatgagtaatgaaggatcttatttcttcggagacaatgcagatgagtacgacaattaaagaaaaatacccttgtttctacttctagaccaggcgcctggatccagatctgctgtgccttctagttgccagccatctgttgtttgcccctcccccgtgccttccttgaccctggaaggtgccactcccactgtcctttcctaataaaatgaggaaattgcatcgcattgtctgagtaggtgtcattctattctggggggtggggtggggcagcacagcaagggggaggattgggaagacaatagcaggcatgctggggatgcggtgggctctatgggtacccaggtgctgaagaattgacccggttcctcctgggccagaaagaagcaggcacatccccttctctgtgacacaccctgtccacgcccctggttcttagttccagccccactcataggacactcatagctcaggagggctccgccttcaatcccacccgctaaagtacttggagcggtctctccctccctcatcagcccaccaaaccaaacctagcctccaagagtgggaagaaattaaagcaagataggctattaagtgcagagggagagaaaatgcctccaacatgtgaggaagtaatgagagaaatcatagaatttcttccgcttcctcgctcactgactcgctgcgctcggtcgttcggctgcggcgagcggtatcagctcactcaaaggcggtaatacggttatccacagaatcaggggataacgcaggaaagaacatgtgagcaaaaggccagcaaaaggccaggaaccgtaaaaaggccgcgttgctggcgtttttccataggctccgcccccctgacgagcatcacaaaaatcgacgctcaagtcagaggtggcgaaacccgacaggactataaagataccaggcgtttccccctggaagctccctcgtgcgctctcctgttccgaccctgccgcttaccggatacctgtccgcctttctcccttcgggaagcgtggcgctttctcaatgctcacgctgtaggtatctcagttcggtgtaggtcgttcgctccaagctgggctgtgtgcacgaaccccccgttcagcccgaccgctgcgccttatccggtaactatcgtcttgagtccaacccggtaagacacgacttatcgccactggcagcagccactggtaacaggattagcagagcgaggtatgtaggcggtgctacagagttcttgaagtggtggcctaactacggctacactagaaggacagtatttggtatctgcgctctgctgaagccagttaccttcggaaaaagagttggtagctcttgatccggcaaacaaaccaccgctggtagcggtggtttttttgtttgcaagcagcagattacgcgcagaaaaaaaggatctcaagaagatcctttgatcttttctacggggtctgacgctcagtggaacgaaaactcacgttaagggattttggtcatgagattatcaaaaaggatcttcacctagatccttttaaattaaaaatgaagttttaaatcaatctaaagtatatatgagtaaacttggtctgacagttaccaatgcttaatcagtgaggcacctatctcagcgatctgtctatttcgttcatccatagttgcctgactccggggggggggggcgctgaggtctgcctcgtgaagaaggtgttgctgactcataccaggcctgaatcgccccatcatccagccagaaagtgagggagccacggttgatgagagctttgttgtaggtggaccagttggtgattttgaacttttgctttgccacggaacggtctgcgttgtcgggaagatgcgtgatctgatccttcaactcagcaaaagttcgatttattcaacaaagccgccgtcccgtcaagtcagcgtaatgctctgccagtgttacaaccaattaaccaattctgattagaaaaactcatcgagcatcaaatgaaactgcaatttattcatatcaggattatcaataccatatttttgaaaaagccgtttctgtaatgaaggagaaaactcaccgaggcagttccataggatggcaagatcctggtatcggtctgcgattccgactcgtccaacatcaatacaacctattaatttcccctcgtcaaaaataaggttatcaagtgagaaatcaccatgagtgacgactgaatccggtgagaatggcaaaagcttatgcatttctttccagacttgttcaacaggccagccattacgctcgtcatcaaaatcactcgcatcaaccaaaccgttattcattcgtgattgcgcctgagcgagacgaaatacgcgatcgctgttaaaaggacaattacaaacaggaatcgaatgcaaccggcgcaggaacactgccagcgcatcaacaatattttcacctgaatcaggatattcttctaatacctggaatgctgttttcccggggatcgcagtggtgagtaaccatgcatcatcaggagtacggataaaatgcttgatggtcggaagaggcataaattccgtcagccagtttagtctgaccatctcatctgtaacatcattggcaacgctacctttgccatgtttcagaaacaactctggcgcatcgggcttcccatacaatcgatagattgtcgcacctgattgcccgacattatcgcgagcccatttatacccatataaatcagcatccatgttggaatttaatcgcggcctcgagcaagacgtttcccgttgaatatggctcataacaccccttgtattactgtttatgtaagcagacagttttattgttcatgatgatatatttttatcttgtgcaatgtaacatcagagattttgagacacaacgtggctttccccccccccccattattgaagcatttatcagggttattgtctcatgagcggatacatatttgaatgtatttagaaaaataaacaaataggggttccgcgcacatttccccgaaaagtgccacctgacgtctaagaaaccattattatcatgacattaacctataaaaataggcgtatcacgaggccctttcgtc

SEQ ID NO: 126 - DNA, 7741 bp, Artificial Sequence
  Plasmid DNA: VRC 7710
ttaattaaccgcaattctcatgtttgacagcttatcatcatcaataatataccttattttggattgaagccaatatgataatgagggggtggagtttgtgacgtggcgcggggcgtgggaacggggcgggtgacgtagtagtgtggcggaagtgtgatgttgcaagtgtggcggaacacatgtaagcgacggatgtggcaaaagtgacgtttttggtgtgcgccggtgtacacaggaagtgacaattttcgcgcggttttaggcggatgttgtagtaaatttgggcgtaaccgagtaagatttggccattttcgcgggaaaactgaataagaggaagtgaaatctgaataattttgtgttactcatagcgcgtaatatttgtctagggccgcggggactttgaccgtttacgtggagactcgcccaggtgtttttctcaggtgttttccgcgttccgggtcaaagttggcgttttattattatagtcagtacgtaccagtgcactggcctagagcggccccattgcatacgttgtatccatatcataatatgtacatttatattggctcatgtccaacattaccgccatgttgacattgattattgactagttattaatagtaatcaattacggggtcattagttcatagcccatatatggagttccgcgttacataacttacggtaaatggcccgcctggctgaccgcccaacgacccccgcccattgacgtcaataatgacgtatgttcccatagtaacgccaatagggactttccattgacgtcaatgggtggagtatttacggtaaactgcccacttggcagtacatcaagtgtatcatatgccaagtacgccccctattgacgtcaatgacggtaaatggcccgcctggcattatgcccagtacatgaccttatgggactttcctacttggcagtacatctacgtattagtcatcgctattaccatggtgatgcggttttggcagtacatcaatgggcgtggatagcggtttgactcacggggatttccaagtctccaccccattgacgtcaatgggagtttgttttggcaccaaaatcaacgggactttccaaaatgtcgtaacaactccgccccattgacgcaaatgggcggtaggcgtgtacggtgggaggtctatataagcagagctcgtttagtgaaccgtcagatcgcctggagacgccatccacgctgttttgacctccatagaagacaccgggaccgatccagcctccgtcaccgtcgtcgacagcaaaagcagggtagataatcactcactgagtgacatcaaaatcatggcgtcccaaggcaccaaacggtcttacgaacagatggagactgatggagaacgccagaatgccactgaaatcagagcatccgtcggaaaaatgattggtggaattggacgattctacatccaaatgtgcaccgaactcaaactcagtgattatgagggacggttgatccaaaacagcttaacaatagagagaatggtgctctctgcttttgacgaaaggagaaataaatacctggaagaacatcccagtgcggggaaagatcctaagaaaactggaggacctatatacaggagagtaaacggaaagtggatgagagaactcatcctttatgacaaagaagaaataaggcgaatctggcgccaagctaataatggtgacgatgcaacggctggtctgactcacatgatgatctggcattccaatttgaatgatgcaacttatcagaggacaagagctcttgttcgcaccggaatggatcccaggatgtgctctctgatgcaaggttcaactctccctaggaggtctggagccgcaggtgctgcagtcaaaggagttggaacaatggtgatggaattggtcaggatgatcaaacgtgggatcaatgatcggaacttctggaggggtgagaatggacgaaaaacaagaattgcttatgaaagaatgtgcaacattctcaaagggaaatttcaaactgctgcacaaaaagcaatgatggatcaagtgagagagagccggaacccagggaatgctgagttcgaagatctcacttttctagcacggtctgcactcatattgagagggtcggttgctcacaagtcctgcctgcctgcctgtgtgtatggacctgccgtagccagtgggtacgactttgaaagggagggatactctctagtcggaatagaccctttcagactgcttcaaaacagccaagtgtacagcctaatcagaccaaatgagaatccagcacacaagagtcaactggtgtggatggcatgccattctgccgcatttgaagatctaagagtattaagcttcatcaaagggacgaaggtgctcccaagagggaagctttccactagaggagttcaaattgcttccaatgaaaatatggagactatggaatcaagtacacttgaactgagaagcaggtactgggccataaggaccagaagtggaggaaacaccaatcaacagagggcatctgcgggccaaatcagcatacaacctacgttctcagtacagagaaatctcccttttgacagaacaaccattatggcagcattcaatgggaatacagagggaagaacatctgacatgaggaccgaaatcataaggatgatggaaagtgcaagaccagaagatgtgtctttccaggggcggggagtcttcgagctctcggacgaaaaggcagcgagcccgatcgtgccttcctttgacatgagtaatgaaggatcttatttcttcggagacaatgcagatgagtacgacaattaaagaaaaatacccttgtttctacttctagaccaggcgcctggatccagatctgctgtgccttctagttgccagccatctgttgtttgcccctcccccgtgccttccttgaccctggaaggtgccactcccactgtcctttcctaataaaatgaggaaattgcatcgcattgtctgagtaggtgtcattctattctggggggtggggtggggcagcacagcaagggggaggattgggaagacaatagcaggcatgctggggatgcggtgggctctatgggtacccagggccgcataacttcgtataatgtatgctatacgaagttataagatctgtactgaaatgtgtgggcgtggcttaagggtgggaaagaatatataaggtgggggtcttatgtagttttgtatctgttttgcagcagccgccgccgccatgagcaccaactcgtttgatggaagcattgtgagctcatatttgacaacgcgcatgcccccatgggccggggtgcgtcagaatgtgatgggctccagcattgatggtcgccccgtcctgcccgcaaactctactaccttgacctacgagaccgtgtctggaacgccgttggagactgcagcctccgccgccgcttcagccgctgcagccaccgcccgcgggattgtgactgactttgctttcctgagcccgcttgcaagcagtgcagcttcccgttcatccgcccgcgatgacaagttgacggctcttttggcacaattggattctttgacccgggaacttaatgtcgtttctcagcagctgttggatctgcgccagcaggtttctgccctgaaggcttcctcccctcccaatgcggtttaaaacataaataaaaaaccagactctgtttggatttggatcaagcaagtgtcttgctgtctttatttaggggttttgcgcgcgcggtaggcccgggaccagcggtctcggtcgttgagggtcctgtgtattttttccaggacgtggtaaaggtgactctggatgttcagatacatgggcataagcccgtctctggggtggaggtagcaccactgcagagcttcatgctgcggggtggtgttgtagatgatccagtcgtagcaggagcgctgggcgtggtgcctaaaaatgtctttcagtagcaagctgattgccaggggcaggcccttggtgtaagtgtttacaaagcggttaagctgggatgggtgcatacgtggggatatgagatgcatcttggactgtatttttaggttggctatgttcccagccatatccctccggggattcatgttgtgcagaaccaccagcacagtgtatccggtgcacttgggaaatttgtcatgtagcttagaaggaaatgcgtggaagaacttggagacgcccttgtgacctccaagattttccatgcattcgtccataatgatggcaatgggcccacgggcggcggcctgggcgaagatatttctgggatcactaacgtcatagttgtgttccaggatgagatcgtcataggccatttttacaaagcgcgggcggagggtgccagactgcggtataatggttccatccggcccaggggcgtagttaccctcacagatttgcatttcccacgctttgagttcagatggggggatcatgtctacctgcggggcgatgaagaaaacggtttccggggtaggggagatcagctgggaagaaagcaggttcctgagcagctgcgacttaccgcagccggtgggcccgtaaatcacacctattaccggctgcaactggtagttaagagagctgcagctgccgtcatccctgagcaggggggccacttcgttaagcatgtccctgactcgcatgttttccctgaccaaatccgccagaaggcgctcgccgcccagcgatagcagttcttgcaaggaagcaaagtttttcaacggtttgagaccgtccgccgtaggcatgcttttgagcgtttgaccaagcagttccaggcggtcccacagctcggtcacctgctctacggcatctcgatccagcatatctcctcgtttcgcgggttggggcggctttcgctgtacggcagtagtcggtgctcgtccagacgggccagggtcatgtctttccacgggcgcagggtcctcgtcagcgtagtctgggtcacggtgaaggggtgcgctccgggctgcgcgctggccagggtgcgcttgaggctggtcctgctggtgctgaagcgctgccggtcttcgccctgcgcgtcggccaggtagcatttgaccatggtgtcatagtccagcccctccgcggcgtggcccttggcgcgcagcttgcccttggaggaggcgccgcacgaggggcagtgcagacttttgagggcgtagagcttgggcgcgagaaataccgattccggggagtaggcatccgcgccgcaggccccgcagacggtctcgcattccacgagccaggtgagctctggccgttcggggtcaaaaaccaggtttcccccatgctttttgatgcgtttcttacctctggtttccatgagccggtgtccacgctcggtgacgaaaaggctgtccgtgtccccgtatacagacttgagaggcctgtcctcgagcggtgttccgcggtcctcctcgtatagaaactcggaccactctgagacaaaggctcgcgtccaggccagcacgaaggaggctaagtgggaggggtagcggtcgttgtccactagggggtccactcgctccagggtgtgaagacacatgtcgccctcttcggcatcaaggaaggtgattggtttgtaggtgtaggccacgtgaccgggtgttcctgaaggggggctataaaagggggtgggggcgcgttcgtcctcactctcttccgcatcgctgtctgcgagggccagctgttggggtgagtcgatcgacgcgaggctggatggccttccccattatgattcttctcgcttccggcggcatcgggatgcccgcgttgcaggccatgctgtccaggcaggtagatgacgaccatcagggacagcttcaaggccagcaaaaggccaggaaccgtaaaaaggccgcgttgctggcgtttttccataggctccgcccccctgacgagcatcacaaaaatcgacgctcaagtcagaggtggcgaaacccgacaggactataaagataccaggcgtttccccctggaagctccctcgtgcgctctcctgttccgaccctgccgcttaccggatacctgtccgcctttctcccttcgggaagcgtggcgctttctcatagctcacgctgtaggtatctcagttcggtgtaggtcgttcgctccaagctgggctgtgtgcacgaaccccccgttcagcccgaccgctgcgccttatccggtaactatcgtcttgagtccaacccggtaagacacgacttatcgccactggcagcagccactggtaacaggattagcagagcgaggtatgtaggcggtgctacagagttcttgaagtggtggcctaactacggctacactagaaggacagtatttggtatctgcgctctgctgaagccagttaccttcggaaaaagagttggtagctcttgatccggcaaacaaaccaccgctggtagcggtggtttttttgtttgcaagcagcagattacgcgcagaaaaaaaggatctcaagaagatcctttgatcttttctacggggtctgacgctcagtggaacgaaaactcacgttaagggattttggtcatgagattatcaaaaaggatcttcacctagatccttttaaattaaaaatgaagttttaaatcaatctaaagtatatatgagtaaacttggtctgacagttaccaatgcttaatcagtgaggcacctatctcagcgatctgtctatttcgttcatccatagttgcctgactccccgtcgtgtagataactacgatacgggagggcttaccatctggccccagtgctgcaatgataccgcgagacccacgctcaccggctccagatttatcagcaataaaccagccagccggaagggccgagcgcagaagtggtcctgcaactttatccgcctccatccagtctattaattgttgccgggaagctagagtaagtagttcgccagttaatagtttgcgcaacgttgttgccattgctgcaggcatcgtggtgtcacgctcgtcgtttggtatggcttcattcagctccggttcccaacgatcaaggcgagttacatgatcccccatgttgtgcaaaaaagcggttagctccttcggtcctccgatcgttgtcagaagtaagttggccgcagtgttatcactcatggttatggcagcactgcataattctcttactgtcatgccatccgtaagatgcttttctgtgactggtgagtactcaaccaagtcattctgagaatagtgtatgcggcgaccgagttgctcttgcccggcgtcaacacgggataataccgcgccacatagcagaactttaaaagtgctcatcattggaaaacgttcttcggggcgaaaactctcaaggatcttaccgctgttgagatccagttcgatgtaacccactcgtgcacccaactgatcttcagcatcttttactttcaccagcgtttctgggtgagcaaaaacaggaaggcaaaatgccgcaaaaaagggaataagggcgacacggaaatgttgaatactcatactcttcctttttcaatattattgaagcatttatcagggttattgtctcatgagcggatacatatttgaatgtatttagaaaaataaacaaataggggttccgcgcacatttccccgaaaagtgccacctgacgtctaagaaaccattattatcatgacattaacctataaaaataggcgtatcacgaggccctttcgtcttcaagaattgtt

SEQ ID NO: 127 - DNA, 6109 bp, Artificial Sequence
  Plasmid DNA: VRC 7720
tcgcgcgtttcggtgatgacggtgaaaacctctgacacatgcagctcccggagacggtcacagcttgtctgtaagcggatgccgggagcagacaagcccgtcagggcgcgtcagcgggtgttggcgggtgtcggggctggcttaactatgcggcatcagagcagattgtactgagagtgcaccatatgcggtgtgaaataccgcacagatgcgtaaggagaaaataccgcatcagattggctattggccattgcatacgttgtatccatatcataatatgtacatttatattggctcatgtccaacattaccgccatgttgacattgattattgactagttattaatagtaatcaattacgggaacttccatagcccatatatggagttccgcgttacataacttacgggaatttccaaacctggctgaccgcccaacgacccccgcccattgacgtcaataatgacgtatgttcccatagtaacgccaatagggaacttccattgacgtcaatgggtggagtatttacggtaaactgcccacttgggaatttccaagtgtatcatatgccaagtacgccccctattgacgtcaatgacgggaacttccataagcttgcattatgcccagtacatgaccttatgggaatttcctacttggcagtacatctacgtattagtcatcgctattaccatggtgatgcggttttggcagtacatcaatgggcgtggatagcggtttgactcacgggaacttccaagtctccaccccattgacgtcaatgggagtttgttttgactcaccaaaatcaacgggaattcccaaaatgtcgtaacaactccgccccattgacgcaaatgggcggtaggcgtgtacggtgggaggtctatataagcagagctcgtttagtgaaccgtcagatcgcctggagacgccatccacgctgttttgacctccatagaagacaccgggaccgatccagcctccatcggctcgcatctctccttcacgcgcccgccgccttacctgaggccgccatccacgccggttgagtcgcgttctgccgcctcccgcctgtggtgcctcctgaactacgtccgccgtctaggtaagtttagagctcaggtcgagaccgggcctttgtccggcgctcccttggagcctacctagactcagccggctctccacgctttgcctgaccctgcttgctcaactctagttaacggtggagggcagtgtagtctgagcagtactcgttgctgccgcgcgcgccaccagacataatagctgacagactaacagactgttcctttccatgggtcttttctgcagtcaccgtcgtcgacgatccgatatcgccgccaccatggagaagatcgtgctgctgttcgccatcgtgagcctggtgaagagcgatcagatctgcatcggataccacgccaataatagcacagagcaggtggatacaatcatggagaagaatgtgacagtgacacacgcccaggatatcctggagaagacacacaatggaaagctgtgcgatctggatggagtgaagcctctgatcctgagagattgcagcgtggccggatggctgctgggaaatcctatgtgcgatgagttcatcaatgtgcctgagtggagctacatcgtggagaaggccaatcctgtgaatgatctgtgctaccctggagatttcaatgattacgaggagctgaagcacctgctgagcagaatcaatcacttcgagaagatccagatcatccctaagagcagctggagcagccacgaggccagcctgggagtgagcagcgcctgcccttaccagagaaagagcagcttcttcagaaatgtggtgtggctgatcaagaagaatagcacataccctacaatcaagagaagctacaataatacaaatcaggaggatctgctggtgctgtggggaatccaccaccctaatgatgccgccgagcagacaaagctgtaccagaatcctacaacatacatcagcgtgggaacaagcacactgaatcagagactggtgcctagaatcgccacaagaagcaaggtgaatggacagagcggaagaatggagttcttctggacaatcctgaagcctaatgatgccatcaatttcgagagcaatggaaatttcatcgctcctgagtacgcctacaagatcgtgaagaagggagatagcacaatcatgaagagcgagctggagtacggaaattgcaatacaaagtgccagacacctatgggagccatcaatagcagcatgcctttccacaatatccaccctctgacaatcggagagtgccctaagtacgtgaagagcaatagactggtgctggccacaggactgagaaatagccctcagagagagagaagaagaaagaagagaggactgttcggagccatcgccggattcatcgagggaggatggcagggaatggtggatggatggtacggataccaccacagcaatgagcagggaagcggatacgccgccgataaggagagcacacagaaggccatcgatggagtgacaaataaggtgaatagcatcatcgataagatgaatacacagttcgaggccgtgggaagagagttcaataatctggagagaagaatcgagaatctgaataagaagatggaggatggattcctggatgtgtggacatacaatgccgagctgctggtgctgatggagaatgagagaacactggatttccacgatagcaatgtgaagaatctgtacgataaggtgagactgcagctgagagataatgccaaggagctgggaaatggatgcttcgagttctaccacaagtgcgataatgagtgcatggagagcgtgagaaatggaacatacgattaccctcagtacagcgaggaggccagactgaagagagaggagatcagcggagtgaagctggagagcatcggaatctaccagatcctgagcatctacagcacagtggccagcagcctggccctggccatcatggtggccggactgagcctgtggatgtgcagcaatggaagcctgcagtgcagaatctgcatctgagcggccgctctagaccaggccctggatccagatctgctgtgccttctagttgccagccatctgttgtttgcccctcccccgtgccttccttgaccctggaaggtgccactcccactgtcctttcctaataaaatgaggaaattgcatcgcattgtctgagtaggtgtcattctattctggggggtggggtggggcaggacagcaagggggaggattgggaagacaatagcaggcatgctggggatgcggtgggctctatgggtacccaggtgctgaagaattgacccggttcctcctgggccagaaagaagcaggcacatccccttctctgtgacacaccctgtccacgcccctggttcttagttccagccccactcataggacactcatagctcaggagggctccgccttcaatcccacccgctaaagtacttggagcggtctctccctccctcatcagcccaccaaaccaaacctagcctccaagagtgggaagaaattaaagcaagataggctattaagtgcagagggagagaaaatgcctccaacatgtgaggaagtaatgagagaaatcatagaattttaaggccatcatggccttaatcttccgcttcctcgctcactgactcgctgcgctcggtcgttcggctgcggcgagcggtatcagctcactcaaaggcggtaatacggttatccacagaatcaggggataacgcaggaaagaacatgtgagcaaaaggccagcaaaaggccaggaaccgtaaaaaggccgcgttgctggcgtttttccataggctccgcccccctgacgagcatcacaaaaatcgacgctcaagtcagaggtggcgaaacccgacaggactataaagataccaggcgtttccccctggaagctccctcgtgcgctctcctgttccgaccctgccgcttaccggatacctgtccgcctttctcccttcgggaagcgtggcgctttctcatagctcacgctgtaggtatctcagttcggtgtaggtcgttcgctccaagctgggctgtgtgcacgaaccccccgttcagcccgaccgctgcgccttatccggtaactatcgtcttgagtccaacccggtaagacacgacttatcgccactggcagcagccactggtaacaggattagcagagcgaggtatgtaggcggtgctacagagttcttgaagtggtggcctaactacggctacactagaagaacagtatttggtatctgcgctctgctgaagccagttaccttcggaaaaagagttggtagctcttgatccggcaaacaaaccaccgctggtagcggtggtttttttgtttgcaagcagcagattacgcgcagaaaaaaaggatctcaagaagatcctttgatcttttctacggggtctgacgctcagtggaacgaaaactcacgttaagggattttggtcatgagattatcaaaaaggatcttcacctagatccttttaaattaaaaatgaagttttaaatcaatctaaagtatatatgagtaaacttggtctgacagttaccaatgcttaatcagtgaggcacctatctcagcgatctgtctatttcgttcatccatagttgcctgactcggggggggggggcgctgaggtctgcctcgtgaagaaggtgttgctgactcataccaggcctgaatcgccccatcatccagccagaaagtgagggagccacggttgatgagagctttgttgtaggtggaccagttggtgattttgaacttttgctttgccacggaacggtctgcgttgtcgggaagatgcgtgatctgatccttcaactcagcaaaagttcgatttattcaacaaagccgccgtcccgtcaagtcagcgtaatgctctgccagtgttacaaccaattaaccaattctgattagaaaaactcatcgagcatcaaatgaaactgcaatttattcatatcaggattatcaataccatatttttgaaaaagccgtttctgtaatgaaggagaaaactcaccgaggcagttccataggatggcaagatcctggtatcggtctgcgattccgactcgtccaacatcaatacaacctattaatttcccctcgtcaaaaataaggttatcaagtgagaaatcaccatgagtgacgactgaatccggtgagaatggcaaaagcttatgcatttctttccagacttgttcaacaggccagccattacgctcgtcatcaaaatcactcgcatcaaccaaaccgttattcattcgtgattgcgcctgagcgagacgaaatacgcgatcgctgttaaaaggacaattacaaacaggaatcgaatgcaaccggcgcaggaacactgccagcgcatcaacaatattttcacctgaatcaggatattcttctaatacctggaatgctgttttcccggggatcgcagtggtgagtaaccatgcatcatcaggagtacggataaaatgcttgatggtcggaagaggcataaattccgtcagccagtttagtctgaccatctcatctgtaacatcattggcaacgctacctttgccatgtttcagaaacaactctggcgcatcgggcttcccatacaatcgatagattgtcgcacctgattgcccgacattatcgcgagcccatttatacccatataaatcagcatccatgttggaatttaatcgcggcctcgagcaagacgtttcccgttgaatatggctcataacaccccttgtattactgtttatgtaagcagacagttttattgttcatgatgatatatttttatcttgtgcaatgtaacatcagagattttgagacacaacgtggctttccccccccccccattattgaagcatttatcagggttattgtctcatgagcggatacatatttgaatgtatttagaaaaataaacaaataggggttccgcgcacatttccccgaaaagtgccacctgacgtctaagaaaccattattatcatgacattaacctataaaaataggcgtatcacgaggccctttcgtc

SEQ ID NO: 128 - DNA, 6127 bp, Artificial Sequence
  Plasmid DNA: VRC 7730
tcgcgcgtttcggtgatgacggtgaaaacctctgacacatgcagctcccggagacggtcacagcttgtctgtaagcggatgccgggagcagacaagcccgtcagggcgcgtcagcgggtgttggcgggtgtcggggctggcttaactatgcggcatcagagcagattgtactgagagtgcaccatatgcggtgtgaaataccgcacagatgcgtaaggagaaaataccgcatcagattggctattggccattgcatacgttgtatccatatcataatatgtacatttatattggctcatgtccaacattaccgccatgttgacattgattattgactagttattaatagtaatcaattacgggaacttccatagcccatatatggagttccgcgttacataacttacgggaatttccaaacctggctgaccgcccaacgacccccgcccattgacgtcaataatgacgtatgttcccatagtaacgccaatagggaacttccattgacgtcaatgggtggagtatttacggtaaactgcccacttgggaatttccaagtgtatcatatgccaagtacgccccctattgacgtcaatgacgggaacttccataagcttgcattatgcccagtacatgaccttatgggaatttcctacttggcagtacatctacgtattagtcatcgctattaccatggtgatgcggttttggcagtacatcaatgggcgtggatagcggtttgactcacgggaacttccaagtctccaccccattgacgtcaatgggagtttgttttgactcaccaaaatcaacgggaattcccaaaatgtcgtaacaactccgccccattgacgcaaatgggcggtaggcgtgtacggtgggaggtctatataagcagagctcgtttagtgaaccgtcagatcgcctggagacgccatccacgctgttttgacctccatagaagacaccgggaccgatccagcctccatcggctcgcatctctccttcacgcgcccgccgccctacctgaggccgccatccacgccggttgagtcgcgttctgccgcctcccgcctgtggtgcctcctgaactgcgtccgccgtctaggtaagtttaaagctcaggtcgagaccgggcctttgtccggcgctcccttggagcctacctagactcagccggctctccacgctttgcctgaccctgcttgctcaactctagttaacggtggagggcagtgtagtctgagcagtactcgttgctgccgcgcgcgccaccagacataatagctgacagactaacagactgttcctttccatgggtcttttctgcagtcaccgtcgtcgacacgtgtgatcagatatcgcggccgctctagagatatcgccaccatggaagccagactgctggtgctgctgtgtgcctttgccgccacaaatgcagatacaatctgtattggctaccacgccaacaatagcaccgataccgtggatacagtgctggagaagaatgtgaccgtgacccactctgtgaatctgctggaggatagccacaatggcaagctgtgtaagctgaaaggaattgcccctctgcagctgggcaaatgtaatattgccggctggctgctgggaaatcctgaatgtgatctgctgctgacagccagcagctggtcttatatcgtggagaccagcaatagcgagaatggcacctgttaccctggcgacttcatcgattacgaggagctgagagaacagctgtctagcgtgtccagcttcgagaagttcgagatcttccctaagacaagcagctggcctaatcacgagacaacaaagggagtgacagccgcctgttcttatgccggagccagctccttttacagaaacctgctgtggctgacaaagaagggcagcagctaccctaagctgtctaagagctacgtgaacaacaagggcaaagaagtgctggtgctgtggggagtgcaccaccctcctacaggaacagatcagcagagcctgtaccagaatgccgatgcctatgtgtctgtgggcagcagcaagtacaacagaagattcacccctgaaattgccgccagacccaaagtgagagatcaggccggcagaatgaattactactggaccctgctggaacctggcgataccatcacatttgaggccaccggaaatctgattgccccttggtatgcctttgccctgaatagaggctctggctctggcatcattacatctgatgcccctgtgcacgactgtaataccaagtgtcagacacctcacggcgccattaatagcagcctgcccttccagaatattcaccctgtgaccatcggcgagtgtcctaagtatgtgaggagcaccaaactgagaatggccaccggcctgagaaatatccctagcatccagagcagaggactgtttggagccatcgccggctttattgagggaggatggaccggaatgatcgatggctggtacggctatcaccaccagaatgagcagggatctggatatgccgccgatcagaagtctacacagaacgccatcgacggcatcacaaacaaggtgaacagcgtgatcgagaagatgaacacccagtttacagctgtgggcaaggagttcaacaacctggagcggagaatcgagaacctgaacaagaaagtggacgacggcttcctggatatttggacctacaatgccgagctgctcgtgctcctggagaatgagagaaccctggacttccacgacagcaatgtgagaaacctgtacgagaaggtgaagagccagctgaagaacaatgccaaggagatcggcaacggctgctttgagttctaccacaagtgtgacgatgcctgtatggagtctgtgagaaacggcacctacgactaccctaagtatagcgaggagagcaagctgaatagagaggagatcgacggcgtgaaactggaaagcatgggcgtgtatcagatcctggccatctattctacagtggcctcttctctggtgctcctggtgtctctgggagccatcagcttttggatgtgtagcaatggcagcctgcagtgcagaatctgtatctgatgaacacgtgggatccagattctgctgtgccttctagttgccagccatctgttgtttgcccctcccccgtgccttccttgaccctggaaggtgccactcccactgtcctttcctaataaaatgaggaaattgcatcgcattgtctgagtaggtgtcattctattctggggggtggggtggggcaggacagcaagggggaggattgggaagacaatagcaggcatgctggggatgcggtgggctctatgggtacccaggtgctgaagaattgacccggttcctcctgggccagaaagaagcaggcacatccccttctctgtgacacaccctgtccacgcccctggttcttagttccagccccactcataggacactcatagctcaggagggctccgccttcaatcccacccgctaaagtacttggagcggtctctccctccctcatcagcccaccaaaccaaacctagcctccaagagtgggaagaaattaaagcaagataggctattaagtgcagagggagagaaaatgcctccaacatgtgaggaagtaatgagagaaatcatagaattttaaggccatgatttaaggccatcatggccttaatcttccgcttcctcgctcactgactcgctgcgctcggtcgttcggctgcggcgagcggtatcagctcactcaaaggcggtaatacggttatccacagaatcaggggataacgcaggaaagaacatgtgagcaaaaggccagcaaaaggccaggaaccgtaaaaaggccgcgttgctggcgtttttccataggctccgcccccctgacgagcatcacaaaaatcgacgctcaagtcagaggtggcgaaacccgacaggactataaagataccaggcgtttccccctggaagctccctcgtgcgctctcctgttccgaccctgccgcttaccggatacctgtccgcctttctcccttcgggaagcgtggcgctttctcatagctcacgctgtaggtatctcagttcggtgtaggtcgttcgctccaagctgggctgtgtgcacgaaccccccgttcagcccgaccgctgcgccttatccggtaactatcgtcttgagtccaacccggtaagacacgacttatcgccactggcagcagccactggtaacaggattagcagagcgaggtatgtaggcggtgctacagagttcttgaagtggtggcctaactacggctacactagaagaacagtatttggtatctgcgctctgctgaagccagttaccttcggaaaaagagttggtagctcttgatccggcaaacaaaccaccgctggtagcggtggtttttttgtttgcaagcagcagattacgcgcagaaaaaaaggatctcaagaagatcctttgatcttttctacggggtctgacgctcagtggaacgaaaactcacgttaagggattttggtcatgagattatcaaaaaggatcttcacctagatccttttaaattaaaaatgaagttttaaatcaatctaaagtatatatgagtaaacttggtctgacagttaccaatgcttaatcagtgaggcacctatctcagcgatctgtctatttcgttcatccatagttgcctgactcggggggggggggcgctgaggtctgcctcgtgaagaaggtgttgctgactcataccaggcctgaatcgccccatcatccagccagaaagtgagggagccacggttgatgagagctttgttgtaggtggaccagttggtgattttgaacttttgctttgccacggaacggtctgcgttgtcgggaagatgcgtgatctgatccttcaactcagcaaaagttcgatttattcaacaaagccgccgtcccgtcaagtcagcgtaatgctctgccagtgttacaaccaattaaccaattctgattagaaaaactcatcgagcatcaaatgaaactgcaatttattcatatcaggattatcaataccatatttttgaaaaagccgtttctgtaatgaaggagaaaactcaccgaggcagttccataggatggcaagatcctggtatcggtctgcgattccgactcgtccaacatcaatacaacctattaatttcccctcgtcaaaaataaggttatcaagtgagaaatcaccatgagtgacgactgaatccggtgagaatggcaaaagcttatgcatttctttccagacttgttcaacaggccagccattacgctcgtcatcaaaatcactcgcatcaaccaaaccgttattcattcgtgattgcgcctgagcgagacgaaatacgcgatcgctgttaaaaggacaattacaaacaggaatcgaatgcaaccggcgcaggaacactgccagcgcatcaacaatattttcacctgaatcaggatattcttctaatacctggaatgctgttttcccggggatcgcagtggtgagtaaccatgcatcatcaggagtacggataaaatgcttgatggtcggaagaggcataaattccgtcagccagtttagtctgaccatctcatctgtaacatcattggcaacgctacctttgccatgtttcagaaacaactctggcgcatcgggcttcccatacaatcgatagattgtcgcacctgattgcccgacattatcgcgagcccatttatacccatataaatcagcatccatgttggaatttaatcgcggcctcgagcaagacgtttcccgttgaatatggctcataacaccccttgtattactgtttatgtaagcagacagttttattgttcatgatgatatatttttatcttgtgcaatgtaacatcagagattttgagacacaacgtggctttccccccccccccattattgaagcatttatcagggttattgtctcatgagcggatacatatttgaatgtatttagaaaaataaacaaataggggttccgcgcacatttccccgaaaagtgccacctgacgtctaagaaaccattattatcatgacattaacctataaaaataggcgtatcacgaggccctttcgtc

SEQ ID NO: 129 - DNA, 6127 bp, Artificial Sequence
  Plasmid DNA: VRC 7731
tcgcgcgtttcggtgatgacggtgaaaacctctgacacatgcagctcccggagacggtcacagcttgtctgtaagcggatgccgggagcagacaagcccgtcagggcgcgtcagcgggtgttggcgggtgtcggggctggcttaactatgcggcatcagagcagattgtactgagagtgcaccatatgcggtgtgaaataccgcacagatgcgtaaggagaaaataccgcatcagattggctattggccattgcatacgttgtatccatatcataatatgtacatttatattggctcatgtccaacattaccgccatgttgacattgattattgactagttattaatagtaatcaattacgggaacttccatagcccatatatggagttccgcgttacataacttacgggaatttccaaacctggctgaccgcccaacgacccccgcccattgacgtcaataatgacgtatgttcccatagtaacgccaatagggaacttccattgacgtcaatgggtggagtatttacggtaaactgcccacttgggaatttccaagtgtatcatatgccaagtacgccccctattgacgtcaatgacgggaacttccataagcttgcattatgcccagtacatgaccttatgggaatttcctacttggcagtacatctacgtattagtcatcgctattaccatggtgatgcggttttggcagtacatcaatgggcgtggatagcggtttgactcacgggaacttccaagtctccaccccattgacgtcaatgggagtttgttttgactcaccaaaatcaacgggaattcccaaaatgtcgtaacaactccgccccattgacgcaaatgggcggtaggcgtgtacggtgggaggtctatataagcagagctcgtttagtgaaccgtcagatcgcctggagacgccatccacgctgttttgacctccatagaagacaccgggaccgatccagcctccatcggctcgcatctctccttcacgcgcccgccgccctacctgaggccgccatccacgccggttgagtcgcgttctgccgcctcccgcctgtggtgcctcctgaactgcgtccgccgtctaggtaagtttaaagctcaggtcgagaccgggcctttgtccggcgctcccttggagcctacctagactcagccggctctccacgctttgcctgaccctgcttgctcaactctagttaacggtggagggcagtgtagtctgagcagtactcgttgctgccgcgcgcgccaccagacataatagctgacagactaacagactgttcctttccatgggtcttttctgcagtcaccgtcgtcgacacgtgtgatcagatatcgcggccgctctagagatatcgccaccatggaagccagactgctggtgctgctgtgtgcctttgccgccacaaatgcagatacaatctgtattggctaccacgccaacaatagcaccgataccgtggatacagtgctggagaagaatgtgaccgtgacccactctgtgaatctgctggaggatagccacaatggcaagctgtgtaagctgaaaggaattgcccctctgcagctgggcaaatgtaatattgccggctggctgctgggaaatcctgaatgtgatctgctgctgacagccagcagctggtcttatatcgtggagaccagcaatagcgagaatggcacctgttaccctggcgacttcatcgattacgaggagctgagagaacagctgtctagcgtgtccagcttcgagaagttcgagatcttccctaagacaagcagctggcctaatcacgagacaacaaagggagtgacagccgcctgttcttatgccggagccagctccttttacagaaacctgctgtggctgacaaagaagggcagcagctaccctaagctgtctaagagctacgtgaacaacaagggcaaagaagtgctggtgctgtggggagtgcaccaccctcctacaggaacagatcagcagagcctgtaccagaatgccgatgcctatgtgtctgtgggcagcagcaagtacaacagaagattcacccctgaaattgccgccagacccaaagtgagagatcaggccggcagaatgaattactactggaccctgctggaacctggcgataccatcacatttgaggccaccggaaatctgattgccccttggtatgcctttgccctgaatagaggctctggctctggcatcattacatctgatgcccctgtgcacgactgtaataccaagtgtcagacacctcacggcgccattaatagcagcctgcccttccagaatattcaccctgtgaccatcggcgagtgtcctaagtatgtgaggagcaccaaactgagaatggccaccggcctgagaaatatccctcagagagagaccagaggactgtttggagccatcgccggctttattgagggaggatggaccggaatgatcgatggctggtacggctatcaccaccagaatgagcagggatctggatatgccgccgatcagaagtctacacagaacgccatcgacggcatcacaaacaaggtgaacagcgtgatcgagaagatgaacacccagtttacagctgtgggcaaggagttcaacaacctggagcggagaatcgagaacctgaacaagaaagtggacgacggcttcctggatatttggacctacaatgccgagctgctcgtgctcctggagaatgagagaaccctggacttccacgacagcaatgtgagaaacctgtacgagaaggtgaagagccagctgaagaacaatgccaaggagatcggcaacggctgctttgagttctaccacaagtgtgacgatgcctgtatggagtctgtgagaaacggcacctacgactaccctaagtatagcgaggagagcaagctgaatagagaggagatcgacggcgtgaaactggaaagcatgggcgtgtatcagatcctggccatctattctacagtggcctcttctctggtgctcctggtgtctctgggagccatcagcttttggatgtgtagcaatggcagcctgcagtgcagaatctgtatctgatgaacacgtgggatccagattctgctgtgccttctagttgccagccatctgttgtttgcccctcccccgtgccttccttgaccctggaaggtgccactcccactgtcctttcctaataaaatgaggaaattgcatcgcattgtctgagtaggtgtcattctattctggggggtggggtggggcaggacagcaagggggaggattgggaagacaatagcaggcatgctggggatgcggtgggctctatgggtacccaggtgctgaagaattgacccggttcctcctgggccagaaagaagcaggcacatccccttctctgtgacacaccctgtccacgcccctggttcttagttccagccccactcataggacactcatagctcaggagggctccgccttcaatcccacccgctaaagtacttggagcggtctctccctccctcatcagcccaccaaaccaaacctagcctccaagagtgggaagaaattaaagcaagataggctattaagtgcagagggagagaaaatgcctccaacatgtgaggaagtaatgagagaaatcatagaattttaaggccatgatttaaggccatcatggccttaatcttccgcttcctcgctcactgactcgctgcgctcggtcgttcggctgcggcgagcggtatcagctcactcaaaggcggtaatacggttatccacagaatcaggggataacgcaggaaagaacatgtgagcaaaaggccagcaaaaggccaggaaccgtaaaaaggccgcgttgctggcgtttttccataggctccgcccccctgacgagcatcacaaaaatcgacgctcaagtcagaggtggcgaaacccgacaggactataaagataccaggcgtttccccctggaagctccctcgtgcgctctcctgttccgaccctgccgcttaccggatacctgtccgcctttctcccttcgggaagcgtggcgctttctcatagctcacgctgtaggtatctcagttcggtgtaggtcgttcgctccaagctgggctgtgtgcacgaaccccccgttcagcccgaccgctgcgccttatccggtaactatcgtcttgagtccaacccggtaagacacgacttatcgccactggcagcagccactggtaacaggattagcagagcgaggtatgtaggcggtgctacagagttcttgaagtggtggcctaactacggctacactagaagaacagtatttggtatctgcgctctgctgaagccagttaccttcggaaaaagagttggtagctcttgatccggcaaacaaaccaccgctggtagcggtggtttttttgtttgcaagcagcagattacgcgcagaaaaaaaggatctcaagaagatcctttgatcttttctacggggtctgacgctcagtggaacgaaaactcacgttaagggattttggtcatgagattatcaaaaaggatcttcacctagatccttttaaattaaaaatgaagttttaaatcaatctaaagtatatatgagtaaacttggtctgacagttaccaatgcttaatcagtgaggcacctatctcagcgatctgtctatttcgttcatccatagttgcctgactcggggggggggggcgctgaggtctgcctcgtgaagaaggtgttgctgactcataccaggcctgaatcgccccatcatccagccagaaagtgagggagccacggttgatgagagctttgttgtaggtggaccagttggtgattttgaacttttgctttgccacggaacggtctgcgttgtcgggaagatgcgtgatctgatccttcaactcagcaaaagttcgatttattcaacaaagccgccgtcccgtcaagtcagcgtaatgctctgccagtgttacaaccaattaaccaattctgattagaaaaactcatcgagcatcaaatgaaactgcaatttattcatatcaggattatcaataccatatttttgaaaaagccgtttctgtaatgaaggagaaaactcaccgaggcagttccataggatggcaagatcctggtatcggtctgcgattccgactcgtccaacatcaatacaacctattaatttcccctcgtcaaaaataaggttatcaagtgagaaatcaccatgagtgacgactgaatccggtgagaatggcaaaagcttatgcatttctttccagacttgttcaacaggccagccattacgctcgtcatcaaaatcactcgcatcaaccaaaccgttattcattcgtgattgcgcctgagcgagacgaaatacgcgatcgctgttaaaaggacaattacaaacaggaatcgaatgcaaccggcgcaggaacactgccagcgcatcaacaatattttcacctgaatcaggatattcttctaatacctggaatgctgttttcccggggatcgcagtggtgagtaaccatgcatcatcaggagtacggataaaatgcttgatggtcggaagaggcataaattccgtcagccagtttagtctgaccatctcatctgtaacatcattggcaacgctacctttgccatgtttcagaaacaactctggcgcatcgggcttcccatacaatcgatagattgtcgcacctgattgcccgacattatcgcgagcccatttatacccatataaatcagcatccatgttggaatttaatcgcggcctcgagcaagacgtttcccgttgaatatggctcataacaccccttgtattactgtttatgtaagcagacagttttattgttcatgatgatatatttttatcttgtgcaatgtaacatcagagattttgagacacaacgtggctttccccccccccccattattgaagcatttatcagggttattgtctcatgagcggatacatatttgaatgtatttagaaaaataaacaaataggggttccgcgcacatttccccgaaaagtgccacctgacgtctaagaaaccattattatcatgacattaacctataaaaataggcgtatcacgaggccctttcgtc

SEQ ID NO: 130 - DNA, 6153 bp, Artificial Sequence
  Plasmid DNA: VRC 7732
tcgcgcgtttcggtgatgacggtgaaaacctctgacacatgcagctcccggagacggtcacagcttgtctgtaagcggatgccgggagcagacaagcccgtcagggcgcgtcagcgggtgttggcgggtgtcggggctggcttaactatgcggcatcagagcagattgtactgagagtgcaccatatgcggtgtgaaataccgcacagatgcgtaaggagaaaataccgcatcagattggctattggccattgcatacgttgtatccatatcataatatgtacatttatattggctcatgtccaacattaccgccatgttgacattgattattgactagttattaatagtaatcaattacgggaacttccatagcccatatatggagttccgcgttacataacttacgggaatttccaaacctggctgaccgcccaacgacccccgcccattgacgtcaataatgacgtatgttcccatagtaacgccaatagggaacttccattgacgtcaatgggtggagtatttacggtaaactgcccacttgggaatttccaagtgtatcatatgccaagtacgccccctattgacgtcaatgacgggaacttccataagcttgcattatgcccagtacatgaccttatgggaatttcctacttggcagtacatctacgtattagtcatcgctattaccatggtgatgcggttttggcagtacatcaatgggcgtggatagcggtttgactcacgggaacttccaagtctccaccccattgacgtcaatgggagtttgttttgactcaccaaaatcaacgggaattcccaaaatgtcgtaacaactccgccccattgacgcaaatgggcggtaggcgtgtacggtgggaggtctatataagcagagctcgtttagtgaaccgtcagatcgcctggagacgccatccacgctgttttgacctccatagaagacaccgggaccgatccagcctccatcggctcgcatctctccttcacgcgcccgccgccctacctgaggccgccatccacgccggttgagtcgcgttctgccgcctcccgcctgtggtgcctcctgaactgcgtccgccgtctaggtaagtttaaagctcaggtcgagaccgggcctttgtccggcgctcccttggagcctacctagactcagccggctctccacgctttgcctgaccctgcttgctcaactctagttaacggtggagggcagtgtagtctgagcagtactcgttgctgccgcgcgcgccaccagacataatagctgacagactaacagactgttcctttccatgggtcttttctgcagtcaccgtcgtcgacacgtgtgatcagatatcgcggccgctctagagatatcgccaccatggaagccagactgctggtgctgctgtgtgcctttgccgccacaaatgcagatacaatctgtattggctaccacgccaacaatagcaccgataccgtggatacagtgctggagaagaatgtgaccgtgacccactctgtgaatctgctggaggatagccacaatggcaagctgtgtaagctgaaaggaattgcccctctgcagctgggcaaatgtaatattgccggctggctgctgggaaatcctgaatgtgatctgctgctgacagccagcagctggtcttatatcgtggagaccagcaatagcgagaatggcacctgttaccctggcgacttcatcgattacgaggagctgagagaacagctgtctagcgtgtccagcttcgagaagttcgagatcttccctaagacaagcagctggcctaatcacgagacaacaaagggagtgacagccgcctgttcttatgccggagccagctccttttacagaaacctgctgtggctgacaaagaagggcagcagctaccctaagctgtctaagagctacgtgaacaacaagggcaaagaagtgctggtgctgtggggagtgcaccaccctcctacaggaacagatcagcagagcctgtaccagaatgccgatgcctatgtgtctgtgggcagcagcaagtacaacagaagattcacccctgaaattgccgccagacccaaagtgagagatcaggccggcagaatgaattactactggaccctgctggaacctggcgataccatcacatttgaggccaccggaaatctgattgccccttggtatgcctttgccctgaatagaggctctggctctggcatcattacatctgatgcccctgtgcacgactgtaataccaagtgtcagacacctcacggcgccattaatagcagcctgcccttccagaatattcaccctgtgaccatcggcgagtgtcctaagtatgtgaggagcaccaaactgagaatggccaccggcctgagaaatatccctcagagagagaccagaggactgtttggagccatcgccggctttattgagggaggatggaccggaatgatcgatggctggtacggctatcaccaccagaatgagcagggatctggatatgccgccgatcagaagtctacacagaacgccatcgacggcatcacaaacaaggtgaacagcgtgatcgagaagatgaacacccagtttacagctgtgggcaaggagttcaacaacctggagcggagaatcgagaacctgaacaagaaagtggacgacggcttcctggatatttggacctacaatgccgagctgctcgtgctcctggagaatgagagaaccctggacttccacgacagcaatgtgagaaacctgtacgagaaggtgaagagccagctgaagaacaatgccaaggagatcggcaacggctgctttgagttctaccacaagtgtgacgatgcctgtatggagtctgtgagaaacggcacctacgactaccctaagtatagcgaggagagcaagctgaatagagaggagatcgacggcgtgaaactggaaagcatgggcgtgtatcagatcagaagcctggtgcctagaggatctcctggcagcggatatattcctgaggcccctagagatggacaggcctatgtgagaaaggatggcgaatgggtgctgctgtctacatttctgggacaccaccatcaccaccattgatgaacacgtgggatccagatctgctgtgccttctagttgccagccatctgttgtttgcccctcccccgtgccttccttgaccctggaaggtgccactcccactgtcctttcctaataaaatgaggaaattgcatcgcattgtctgagtaggtgtcattctattctggggggtggggtggggcaggacagcaagggggaggattgggaagacaatagcaggcatgctggggatgcggtgggctctatgggtacccaggtgctgaagaattgacccggttcctcctgggccagaaagaagcaggcacatccccttctctgtgacacaccctgtccacgcccctggttcttagttccagccccactcataggacactcatagctcaggagggctccgccttcaatcccacccgctaaagtacttggagcggtctctccctccctcatcagcccaccaaaccaaacctagcctccaagagtgggaagaaattaaagcaagataggctattaagtgcagagggagagaaaatgcctccaacatgtgaggaagtaatgagagaaatcatagaattttaaggccatgatttaaggccatcatggccttaatcttccgcttcctcgctcactgactcgctgcgctcggtcgttcggctgcggcgagcggtatcagctcactcaaaggcggtaatacggttatccacagaatcaggggataacgcaggaaagaacatgtgagcaaaaggccagcaaaaggccaggaaccgtaaaaaggccgcgttgctggcgtttttccataggctccgcccccctgacgagcatcacaaaaatcgacgctcaagtcagaggtggcgaaacccgacaggactataaagataccaggcgtttccccctggaagctccctcgtgcgctctcctgttccgaccctgccgcttaccggatacctgtccgcctttctcccttcgggaagcgtggcgctttctcatagctcacgctgtaggtatctcagttcggtgtaggtcgttcgctccaagctgggctgtgtgcacgaaccccccgttcagcccgaccgctgcgccttatccggtaactatcgtcttgagtccaacccggtaagacacgacttatcgccactggcagcagccactggtaacaggattagcagagcgaggtatgtaggcggtgctacagagttcttgaagtggtggcctaactacggctacactagaagaacagtatttggtatctgcgctctgctgaagccagttaccttcggaaaaagagttggtagctcttgatccggcaaacaaaccaccgctggtagcggtggtttttttgtttgcaagcagcagattacgcgcagaaaaaaaggatctcaagaagatcctttgatcttttctacggggtctgacgctcagtggaacgaaaactcacgttaagggattttggtcatgagattatcaaaaaggatcttcacctagatccttttaaattaaaaatgaagttttaaatcaatctaaagtatatatgagtaaacttggtctgacagttaccaatgcttaatcagtgaggcacctatctcagcgatctgtctatttcgttcatccatagttgcctgactcggggggggggggcgctgaggtctgcctcgtgaagaaggtgttgctgactcataccaggcctgaatcgccccatcatccagccagaaagtgagggagccacggttgatgagagctttgttgtaggtggaccagttggtgattttgaacttttgctttgccacggaacggtctgcgttgtcgggaagatgcgtgatctgatccttcaactcagcaaaagttcgatttattcaacaaagccgccgtcccgtcaagtcagcgtaatgctctgccagtgttacaaccaattaaccaattctgattagaaaaactcatcgagcatcaaatgaaactgcaatttattcatatcaggattatcaataccatatttttgaaaaagccgtttctgtaatgaaggagaaaactcaccgaggcagttccataggatggcaagatcctggtatcggtctgcgattccgactcgtccaacatcaatacaacctattaatttcccctcgtcaaaaataaggttatcaagtgagaaatcaccatgagtgacgactgaatccggtgagaatggcaaaagcttatgcatttctttccagacttgttcaacaggccagccattacgctcgtcatcaaaatcactcgcatcaaccaaaccgttattcattcgtgattgcgcctgagcgagacgaaatacgcgatcgctgttaaaaggacaattacaaacaggaatcgaatgcaaccggcgcaggaacactgccagcgcatcaacaatattttcacctgaatcaggatattcttctaatacctggaatgctgttttcccggggatcgcagtggtgagtaaccatgcatcatcaggagtacggataaaatgcttgatggtcggaagaggcataaattccgtcagccagtttagtctgaccatctcatctgtaacatcattggcaacgctacctttgccatgtttcagaaacaactctggcgcatcgggcttcccatacaatcgatagattgtcgcacctgattgcccgacattatcgcgagcccatttatacccatataaatcagcatccatgttggaatttaatcgcggcctcgagcaagacgtttcccgttgaatatggctcataacaccccttgtattactgtttatgtaagcagacagttttattgttcatgatgatatatttttatcttgtgcaatgtaacatcagagattttgagacacaacgtggctttccccccccccccattattgaagcatttatcagggttattgtctcatgagcggatacatatttgaatgtatttagaaaaataaacaaataggggttccgcgcacatttccccgaaaagtgccacctgacgtctaagaaaccattattatcatgacattaacctataaaaataggcgtatcacgaggccctttcgtc

SEQ ID NO: 131 - DNA, 6114 bp, Artificial Sequence
  Plasmid DNA: VRC 7733
tcgcgcgtttcggtgatgacggtgaaaacctctgacacatgcagctcccggagacggtcacagcttgtctgtaagcggatgccgggagcagacaagcccgtcagggcgcgtcagcgggtgttggcgggtgtcggggctggcttaactatgcggcatcagagcagattgtactgagagtgcaccatatgcggtgtgaaataccgcacagatgcgtaaggagaaaataccgcatcagattggctattggccattgcatacgttgtatccatatcataatatgtacatttatattggctcatgtccaacattaccgccatgttgacattgattattgactagttattaatagtaatcaattacgggaacttccatagcccatatatggagttccgcgttacataacttacgggaatttccaaacctggctgaccgcccaacgacccccgcccattgacgtcaataatgacgtatgttcccatagtaacgccaatagggaacttccattgacgtcaatgggtggagtatttacggtaaactgcccacttgggaatttccaagtgtatcatatgccaagtacgccccctattgacgtcaatgacgggaacttccataagcttgcattatgcccagtacatgaccttatgggaatttcctacttggcagtacatctacgtattagtcatcgctattaccatggtgatgcggttttggcagtacatcaatgggcgtggatagcggtttgactcacgggaacttccaagtctccaccccattgacgtcaatgggagtttgttttgactcaccaaaatcaacgggaattcccaaaatgtcgtaacaactccgccccattgacgcaaatgggcggtaggcgtgtacggtgggaggtctatataagcagagctcgtttagtgaaccgtcagatcgcctggagacgccatccacgctgttttgacctccatagaagacaccgggaccgatccagcctccatcggctcgcatctctccttcacgcgcccgccgccctacctgaggccgccatccacgccggttgagtcgcgttctgccgcctcccgcctgtggtgcctcctgaactgcgtccgccgtctaggtaagtttaaagctcaggtcgagaccgggcctttgtccggcgctcccttggagcctacctagactcagccggctctccacgctttgcctgaccctgcttgctcaactctagttaacggtggagggcagtgtagtctgagcagtactcgttgctgccgcgcgcgccaccagacataatagctgacagactaacagactgttcctttccatgggtcttttctgcagtcaccgtcgtcgacacgtgtgatcagatatcgcggccgctctagagatatcgccaccatggaagccagactgctggtgctgctgtgtgcctttgccgccacaaatgcagatacaatctgtattggctaccacgccaacaatagcaccgataccgtggatacagtgctggagaagaatgtgaccgtgacccactctgtgaatctgctggaggatagccacaatggcaagctgtgtaagctgaaaggaattgcccctctgcagctgggcaaatgtaatattgccggctggctgctgggaaatcctgaatgtgatctgctgctgacagccagcagctggtcttatatcgtggagaccagcaatagcgagaatggcacctgttaccctggcgacttcatcgattacgaggagctgagagaacagctgtctagcgtgtccagcttcgagaagttcgagatcttccctaagacaagcagctggcctaatcacgagacaacaaagggagtgacagccgcctgttcttatgccggagccagctccttttacagaaacctgctgtggctgacaaagaagggcagcagctaccctaagctgtctaagagctacgtgaacaacaagggcaaagaagtgctggtgctgtggggagtgcaccaccctcctacaggaacagatcagcagagcctgtaccagaatgccgatgcctatgtgtctgtgggcagcagcaagtacaacagaagattcacccctgaaattgccgccagacccaaagtgagagatcaggccggcagaatgaattactactggaccctgctggaacctggcgataccatcacatttgaggccaccggaaatctgattgccccttggtatgcctttgccctgaatagaggctctggctctggcatcattacatctgatgcccctgtgcacgactgtaataccaagtgtcagacacctcacggcgccattaatagcagcctgcccttccagaatattcaccctgtgaccatcggcgagtgtcctaagtatgtgaggagcaccaaactgagaatggccaccggcctgagaaatatccctcagagagagaccagaggactgtttggagccatcgccggctttattgagggaggatggaccggaatgatcgatggctggtacggctatcaccaccagaatgagcagggatctggatatgccgccgatcagaagtctacacagaacgccatcgacggcatcacaaacaaggtgaacagcgtgatcgagaagatgaacacccagtttacagctgtgggcaaggagttcaacaacctggagcggagaatcgagaacctgaacaagaaagtggacgacggcttcctggatatttggacctacaatgccgagctgctcgtgctcctggagaatgagagaaccctggacttccacgacagcaatgtgagaaacctgtacgagaaggtgaagagccagctgaagaacaatgccaaggagatcggcaacggctgctttgagttctaccacaagtgtgacgatgcctgtatggagtctgtgagaaacggcacctacgactaccctaagtatagcgaggagagcaagctgaatagagaggagatcagaagcctggtgcctagaggatctcctggcagcggatatattcctgaggcccctagagatggacaggcctatgtgagaaaggatggcgaatgggtgctgctgtctacatttctgggacaccaccatcaccaccattgatgaacacgtgggatccagatctgctgtgccttctagttgccagccatctgttgtttgcccctcccccgtgccttccttgaccctggaaggtgccactcccactgtcctttcctaataaaatgaggaaattgcatcgcattgtctgagtaggtgtcattctattctggggggtggggtggggcaggacagcaagggggaggattgggaagacaatagcaggcatgctggggatgcggtgggctctatgggtacccaggtgctgaagaattgacccggttcctcctgggccagaaagaagcaggcacatccccttctctgtgacacaccctgtccacgcccctggttcttagttccagccccactcataggacactcatagctcaggagggctccgccttcaatcccacccgctaaagtacttggagcggtctctccctccctcatcagcccaccaaaccaaacctagcctccaagagtgggaagaaattaaagcaagataggctattaagtgcagagggagagaaaatgcctccaacatgtgaggaagtaatgagagaaatcatagaattttaaggccatgatttaaggccatcatggccttaatcttccgcttcctcgctcactgactcgctgcgctcggtcgttcggctgcggcgagcggtatcagctcactcaaaggcggtaatacggttatccacagaatcaggggataacgcaggaaagaacatgtgagcaaaaggccagcaaaaggccaggaaccgtaaaaaggccgcgttgctggcgtttttccataggctccgcccccctgacgagcatcacaaaaatcgacgctcaagtcagaggtggcgaaacccgacaggactataaagataccaggcgtttccccctggaagctccctcgtgcgctctcctgttccgaccctgccgcttaccggatacctgtccgcctttctcccttcgggaagcgtggcgctttctcatagctcacgctgtaggtatctcagttcggtgtaggtcgttcgctccaagctgggctgtgtgcacgaaccccccgttcagcccgaccgctgcgccttatccggtaactatcgtcttgagtccaacccggtaagacacgacttatcgccactggcagcagccactggtaacaggattagcagagcgaggtatgtaggcggtgctacagagttcttgaagtggtggcctaactacggctacactagaagaacagtatttggtatctgcgctctgctgaagccagttaccttcggaaaaagagttggtagctcttgatccggcaaacaaaccaccgctggtagcggtggtttttttgtttgcaagcagcagattacgcgcagaaaaaaaggatctcaagaagatcctttgatcttttctacggggtctgacgctcagtggaacgaaaactcacgttaagggattttggtcatgagattatcaaaaaggatcttcacctagatccttttaaattaaaaatgaagttttaaatcaatctaaagtatatatgagtaaacttggtctgacagttaccaatgcttaatcagtgaggcacctatctcagcgatctgtctatttcgttcatccatagttgcctgactcggggggggggggcgctgaggtctgcctcgtgaagaaggtgttgctgactcataccaggcctgaatcgccccatcatccagccagaaagtgagggagccacggttgatgagagctttgttgtaggtggaccagttggtgattttgaacttttgctttgccacggaacggtctgcgttgtcgggaagatgcgtgatctgatccttcaactcagcaaaagttcgatttattcaacaaagccgccgtcccgtcaagtcagcgtaatgctctgccagtgttacaaccaattaaccaattctgattagaaaaactcatcgagcatcaaatgaaactgcaatttattcatatcaggattatcaataccatatttttgaaaaagccgtttctgtaatgaaggagaaaactcaccgaggcagttccataggatggcaagatcctggtatcggtctgcgattccgactcgtccaacatcaatacaacctattaatttcccctcgtcaaaaataaggttatcaagtgagaaatcaccatgagtgacgactgaatccggtgagaatggcaaaagcttatgcatttctttccagacttgttcaacaggccagccattacgctcgtcatcaaaatcactcgcatcaaccaaaccgttattcattcgtgattgcgcctgagcgagacgaaatacgcgatcgctgttaaaaggacaattacaaacaggaatcgaatgcaaccggcgcaggaacactgccagcgcatcaacaatattttcacctgaatcaggatattcttctaatacctggaatgctgttttcccggggatcgcagtggtgagtaaccatgcatcatcaggagtacggataaaatgcttgatggtcggaagaggcataaattccgtcagccagtttagtctgaccatctcatctgtaacatcattggcaacgctacctttgccatgtttcagaaacaactctggcgcatcgggcttcccatacaatcgatagattgtcgcacctgattgcccgacattatcgcgagcccatttatacccatataaatcagcatccatgttggaatttaatcgcggcctcgagcaagacgtttcccgttgaatatggctcataacaccccttgtattactgtttatgtaagcagacagttttattgttcatgatgatatatttttatcttgtgcaatgtaacatcagagattttgagacacaacgtggctttccccccccccccattattgaagcatttatcagggttattgtctcatgagcggatacatatttgaatgtatttagaaaaataaacaaataggggttccgcgcacatttccccgaaaagtgccacctgacgtctaagaaaccattattatcatgacattaacctataaaaataggcgtatcacgaggccctttcgtc

SEQ ID NO: 132 - DNA, 6184 bp, Artificial Sequence
  Plasmid DNA: VRC 7734
tcgcgcgtttcggtgatgacggtgaaaacctctgacacatgcagctcccggagacggtcacagcttgtctgtaagcggatgccgggagcagacaagcccgtcagggcgcgtcagcgggtgttggcgggtgtcggggctggcttaactatgcggcatcagagcagattgtactgagagtgcaccatatgcggtgtgaaataccgcacagatgcgtaaggagaaaataccgcatcagattggctattggccattgcatacgttgtatccatatcataatatgtacatttatattggctcatgtccaacattaccgccatgttgacattgattattgactagttattaatagtaatcaattacgggaacttccatagcccatatatggagttccgcgttacataacttacgggaatttccaaacctggctgaccgcccaacgacccccgcccattgacgtcaataatgacgtatgttcccatagtaacgccaatagggaacttccattgacgtcaatgggtggagtatttacggtaaactgcccacttgggaatttccaagtgtatcatatgccaagtacgccccctattgacgtcaatgacgggaacttccataagcttgcattatgcccagtacatgaccttatgggaatttcctacttggcagtacatctacgtattagtcatcgctattaccatggtgatgcggttttggcagtacatcaatgggcgtggatagcggtttgactcacgggaacttccaagtctccaccccattgacgtcaatgggagtttgttttgactcaccaaaatcaacgggaattcccaaaatgtcgtaacaactccgccccattgacgcaaatgggcggtaggcgtgtacggtgggaggtctatataagcagagctcgtttagtgaaccgtcagatcgcctggagacgccatccacgctgttttgacctccatagaagacaccgggaccgatccagcctccatcggctcgcatctctccttcacgcgcccgccgccctacctgaggccgccatccacgccggttgagtcgcgttctgccgcctcccgcctgtggtgcctcctgaactgcgtccgccgtctaggtaagtttaaagctcaggtcgagaccgggcctttgtccggcgctcccttggagcctacctagactcagccggctctccacgctttgcctgaccctgcttgctcaactctagttaacggtggagggcagtgtagtctgagcagtactcgttgctgccgcgcgcgccaccagacataatagctgacagactaacagactgttcctttccatgggtcttttctgcagtcaccgtcgtcgacacgtgtgatcagatatcgcggccgctctagagatatcgccaccatggaagccagactgctggtgctgctgtgtgcctttgccgccacaaatgcagatacaatctgtattggctaccacgccaacaatagcaccgataccgtggatacagtgctggagaagaatgtgaccgtgacccactctgtgaatctgctggaggatagccacaatggcaagctgtgtaagctgaaaggaattgcccctctgcagctgggcaaatgtaatattgccggctggctgctgggaaatcctgaatgtgatctgctgctgacagccagcagctggtcttatatcgtggagaccagcaatagcgagaatggcacctgttaccctggcgacttcatcgattacgaggagctgagagaacagctgtctagcgtgtccagcttcgagaagttcgagatcttccctaagacaagcagctggcctaatcacgagacaacaaagggagtgacagccgcctgttcttatgccggagccagctccttttacagaaacctgctgtggctgacaaagaagggcagcagctaccctaagctgtctaagagctacgtgaacaacaagggcaaagaagtgctggtgctgtggggagtgcaccaccctcctacaggaacagatcagcagagcctgtaccagaatgccgatgcctatgtgtctgtgggcagcagcaagtacaacagaagattcacccctgaaattgccgccagacccaaagtgagagatcaggccggcagaatgaattactactggaccctgctggaacctggcgataccatcacatttgaggccaccggaaatctgattgccccttggtatgcctttgccctgaatagaggctctggctctggcatcattacatctgatgcccctgtgcacgactgtaataccaagtgtcagacacctcacggcgccattaatagcagcctgcccttccagaatattcaccctgtgaccatcggcgagtgtcctaagtatgtgaggagcaccaaactgagaatggccaccggcctgagaaatatccctcagagagagaccagaggactgtttggagccatcgccggctttattgagggaggatggaccggaatgatcgatggctggtacggctatcaccaccagaatgagcagggatctggatatgccgccgatcagaagtctacacagaacgccatcgacggcatcacaaacaaggtgaacagcgtgatcgagaagatgaacacccagtttacagctgtgggcaaggagttcaacaacctggagcggagaatcgagaacctgaacaagaaagtggacgacggcttcctggatatttggacctacaatgccgagctgctcgtgctcctggagaatgagagaaccctggacttccacgacagcaatgtgagaaacctgtacgagaaggtgaagagccagctgaagaacaatgccaaggagatcggcaacggctgctttgagttctaccacaagtgtgacgatgcctgtatggagtctgtgagaaacggcacctacgactaccctaagtatagcgaggagagcaagctgaatagagaggagatcgacggcgtgaaactggaaagcatgggcgtgtatcagatcggaggaggatctggaggaggaagtggctctagaagcctggtgcctagaggatctcctggcagcggatatattcctgaggcccctagagatggacaggcctatgtgagaaaggatggcgaatgggtgctgctgtctacatttctgggacaccaccatcaccaccattgatgaacacgtgggatccagattctgctgtgccttctagttgccagccatctgttgtttgcccctcccccgtgccttccttgaccctggaaggtgccactcccactgtcctttcctaataaaatgaggaaattgcatcgcattgtctgagtaggtgtcattctattctggggggtggggtggggcaggacagcaagggggaggattgggaagacaatagcaggcatgctggggatgcggtgggctctatgggtacccaggtgctgaagaattgacccggttcctcctgggccagaaagaagcaggcacatccccttctctgtgacacaccctgtccacgcccctggttcttagttccagccccactcataggacactcatagctcaggagggctccgccttcaatcccacccgctaaagtacttggagcggtctctccctccctcatcagcccaccaaaccaaacctagcctccaagagtgggaagaaattaaagcaagataggctattaagtgcagagggagagaaaatgcctccaacatgtgaggaagtaatgagagaaatcatagaattttaaggccatgatttaaggccatcatggccttaatcttccgcttcctcgctcactgactcgctgcgctcggtcgttcggctgcggcgagcggtatcagctcactcaaaggcggtaatacggttatccacagaatcaggggataacgcaggaaagaacatgtgagcaaaaggccagcaaaaggccaggaaccgtaaaaaggccgcgttgctggcgtttttccataggctccgcccccctgacgagcatcacaaaaatcgacgctcaagtcagaggtggcgaaacccgacaggactataaagataccaggcgtttccccctggaagctccctcgtgcgctctcctgttccgaccctgccgcttaccggatacctgtccgcctttctcccttcgggaagcgtggcgctttctcatagctcacgctgtaggtatctcagttcggtgtaggtcgttcgctccaagctgggctgtgtgcacgaaccccccgttcagcccgaccgctgcgccttatccggtaactatcgtcttgagtccaacccggtaagacacgacttatcgccactggcagcagccactggtaacaggattagcagagcgaggtatgtaggcggtgctacagagttcttgaagtggtggcctaactacggctacactagaagaacagtatttggtatctgcgctctgctgaagccagttaccttcggaaaaagagttggtagctcttgatccggcaaacaaaccaccgctggtagcggtggtttttttgtttgcaagcagcagattacgcgcagaaaaaaaggatctcaagaagatcctttgatcttttctacggggtctgacgctcagtggaacgaaaactcacgttaagggattttggtcatgagattatcaaaaaggatcttcacctagatccttttaaattaaaaatgaagttttaaatcaatctaaagtatatatgagtaaacttggtctgacagttaccaatgcttaatcagtgaggcacctatctcagcgatctgtctatttcgttcatccatagttgcctgactcggggggggggggcgctgaggtctgcctcgtgaagaaggtgttgctgactcataccaggcctgaatcgccccatcatccagccagaaagtgagggagccacggttgatgagagctttgttgtaggtggaccagttggtgattttgaacttttgctttgccacggaacggtctgcgttgtcgggaagatgcgtgatctgatccttcaactcagcaaaagttcgatttattcaacaaagccgccgtcccgtcaagtcagcgtaatgctctgccagtgttacaaccaattaaccaattctgattagaaaaactcatcgagcatcaaatgaaactgcaatttattcatatcaggattatcaataccatatttttgaaaaagccgtttctgtaatgaaggagaaaactcaccgaggcagttccataggatggcaagatcctggtatcggtctgcgattccgactcgtccaacatcaatacaacctattaatttcccctcgtcaaaaataaggttatcaagtgagaaatcaccatgagtgacgactgaatccggtgagaatggcaaaagcttatgcatttctttccagacttgttcaacaggccagccattacgctcgtcatcaaaatcactcgcatcaaccaaaccgttattcattcgtgattgcgcctgagcgagacgaaatacgcgatcgctgttaaaaggacaattacaaacaggaatcgaatgcaaccggcgcaggaacactgccagcgcatcaacaatattttcacctgaatcaggatattcttctaatacctggaatgctgttttcccggggatcgcagtggtgagtaaccatgcatcatcaggagtacggataaaatgcttgatggtcggaagaggcataaattccgtcagccagtttagtctgaccatctcatctgtaacatcattggcaacgctacctttgccatgtttcagaaacaactctggcgcatcgggcttcccatacaatcgatagattgtcgcacctgattgcccgacattatcgcgagcccatttatacccatataaatcagcatccatgttggaatttaatcgcggcctcgagcaagacgtttcccgttgaatatggctcataacaccccttgtattactgtttatgtaagcagacagttttattgttcatgatgatatatttttatcttgtgcaatgtaacatcagagattttgagacacaacgtggctttccccccccccccattattgaagcatttatcagggttattgtctcatgagcggatacatatttgaatgtatttagaaaaataaacaaataggggttccgcgcacatttccccgaaaagtgccacctgacgtctaagaaaccattattatcatgacattaacctataaaaataggcgtatcacgaggccctttcgtc

SEQ ID NO: 133 - DNA, 12251 bp, Artificial Sequence
  Plasmid DNA: VRC 7735
tcgcgcgtttcggtgatgacggtgaaaacctctgacacatgcagctcccggagacggtcacagcttgtctgtaagcggatgccgggagcagacaagcccgtcagggcgcgtcagcgggtgttggcgggtgtcggggctggcttaactatgcggcatcagagcagattgtactgagagtgcaccatatgcggtgtgaaataccgcacagatgcgtaaggagaaaataccgcatcagattggctattggccattgcatacgttgtatccatatcataatatgtacatttatattggctcatgtccaacattaccgccatgttgacattgattattgactagttattaatagtaatcaattacgggaacttccatagcccatatatggagttccgcgttacataacttacgggaatttccaaacctggctgaccgcccaacgacccccgcccattgacgtcaataatgacgtatgttcccatagtaacgccaatagggaacttccattgacgtcaatgggtggagtatttacggtaaactgcccacttgggaatttccaagtgtatcatatgccaagtacgccccctattgacgtcaatgacgggaacttccataagcttgcattatgcccagtacatgaccttatgggaatttcctacttggcagtacatctacgtattagtcatcgctattaccatggtgatgcggttttggcagtacatcaatgggcgtggatagcggtttgactcacgggaacttccaagtctccaccccattgacgtcaatgggagtttgttttgactcaccaaaatcaacgggaattcccaaaatgtcgtaacaactccgccccattgacgcaaatgggcggtaggcgtgtacggtgggaggtctatataagcagagctcgtttagtgaaccgtcagatcgcctggagacgccatccacgctgttttgacctccatagaagacaccgggaccgatccagcctccatcggctcgcatctctccttcacgcgcccgccgccctacctgaggccgccatccacgccggttgagtcgcgttctgccgcctcccgcctgtggtgcctcctgaactgcgtccgccgtctaggtaagtttaaagctcaggtcgagaccgggcctttgtccggcgctcccttggagcctacctagactcagccggctctccacgctttgcctgaccctgcttgctcaactctagttaacggtggagggcagtgtagtctgagcagtactcgttgctgccgcgcgcgccaccagacataatagctgacagactaacagactgttcctttccatgggtcttttctgcagtcaccgtcgtcgacacgtgtgatcagatatcgcggccgctctagagatatcgccaccatggaagccagactgctggtgctgctgtgtgcctttgccgccacaaatgcagatacaatctgtattggctaccacgccaacaatagcaccgataccgtggatacagtgctggagaagaatgtgaccgtgacccactctgtgaatctgctggaggatagccacaatggcaagctgtgtaagctgaaaggaattgcccctctgcagctgggcaaatgtaatattgccggctggctgctgggaaatcctgaatgtgatctgctgctgacagccagcagctggtcttatatcgtggagaccagcaatagcgagaatggcacctgttaccctggcgacttcatcgattacgaggagctgagagaacagctgtctagcgtgtccagcttcgagaagttcgagatcttccctaagacaagcagctggcctaatcacgagacaacaaagggagtgacagccgcctgttcttatgccggagccagctccttttacagaaacctgctgtggctgacaaagaagggcagcagctaccctaagctgtctaagagctacgtgaacaacaagggcaaagaagtgctggtgctgtggggagtgcaccaccctcctacaggaacagatcagcagagcctgtaccagaatgccgatgcctatgtgtctgtgggcagcagcaagtacaacagaagattcacccctgaaattgccgccagacccaaagtgagagatcaggccggcagaatgaattactactggaccctgctggaacctggcgataccatcacatttgaggccaccggaaatctgattgccccttggtatgcctttgccctgaatagaggctctggctctggcatcattacatctgatgcccctgtgcacgactgtaataccaagtgtcagacacctcacggcgccattaatagcagcctgcccttccagaatattcaccctgtgaccatcggcgagtgtcctaagtatgtgaggagcaccaaactgagaatggccaccggcctgagaaatatccctcagagagagaccagaggactgtttggagccatcgccggctttattgagggaggatggaccggaatgatcgatggctggtacggctatcaccaccagaatgagcagggatctggatatgccgccgatcagaagtctacacagaacgccatcgacggcatcacaaacaaggtgaacagcgtgatcgagaagatgaacacccagtttacagctgtgggcaaggagttcaacaacctggagcggagaatcgagaacctgaacaagaaagtggacgacggcttcctggatatttggacctacaatgccgagctgctcgtgctcctggagaatgagagaaccctggacttccacgacagcaatgtgagaaacctgtacgagaaggtgaagagccagctgaagaacaatgccaaggagatcggcaacggctgctttgagttctaccacaagtgtgacgatgcctgtatggagtctgtgagaaacggcacctacgactaccctaagtatagcgaggagagcaagctgaatagagaggagatcggaggaggatctggaggaggaagtggctctagaagcctggtgcctagaggatctcctggcagcggatatattcctgaggcccctagagatggacaggcctatgtgagaaaggatggcgaatgggtgctgctgtctacatttctgggacaccaccatcaccaccattgatgaacacgtgggatccagatctgctgtgcttctagttgccagccatctgttgtttgcccctcccccgtgccttccttgaccctggaaggtgccactcccactgtcctttcctaataaaatgaggaaattgcatcgcattgtctgagtaggtgtcattctattctggggggtggggtggggcaggacagcaagggggaggattgggaagacaatagcaggcatgctggggatgcggtgggctctatgggtacccaggtgctgaagaattgacccggttcctcctgggccagaaagaagcaggcacatccccttctctgtgacacaccctgtccacgcccctggttcttagttccagccccactcataggacactcatagctcaggagggctccgccttcaatcccacccgctaaagtacttggagcggtctctccctccctcatcagcccaccaaaccaaacctagcctccaagagtgggaagaaattaaagcaagataggctattaagtgcagagggagagaaaatgcctccaacatgtgaggaagtaatgagagaaatcatagaattttaaggccatgatttaaggccatcatggccttaatcttccgcttcctcgctcactgactcgctgcgctcggtcgttcggctgcggcgagcggtatcagctcactcaaaggcggtaatacggttatccacagaatcaggggataacgcaggaaagaacatgtgagcaaaaggccagcaaaaggccaggaaccgtaaaaaggccgcgttgctggcgtttttccataggctccgcccccctgacgagcatcacaaaaatcgacgctcaagtcagaggtggcgaaacccgacaggactataaagataccaggcgtttccccctggaagctccctcgtgcgctctcctgttccgaccctgccgcttaccggatacctgtccgcctttctcccttcgggaagcgtggcgctttctcatagctcacgctgtaggtatctcagttcggtgtaggtcgttcgctccaagctgggctgtgtgcacgaaccccccgttcagcccgaccgctgcgccttatccggtaactatcgtcttgagtccaacccggtaagacacgacttatcgccactggcagcagccactggtaacaggattagcagagcgaggtatgtaggcggtgctacagagttcttgaagtggtggcctaactacggctacactagaagaacagtatttggtatctgcgctctgctgaagccagttaccttcggaaaaagagttggtagctcttgatccggcaaacaaaccaccgctggtagcggtggtttttttgtttgcaagcagcagattacgcgcagaaaaaaaggatctcaagaagatcctttgatcttttctacggggtctgacgctcagtggaacgaaaactcacgttaagggattttggtcatgagattatcaaaaaggatcttcacctagatccttttaaattaaaaatgaagttttaaatcaatctaaagtatatatgagtaaacttggtctgacagttaccaatgcttaatcagtgaggcacctatctcagcgatctgtctatttcgttcatccatagttgcctgactcggggggggggggcgctgaggtctgcctcgtgaagaaggtgttgctgactcataccaggcctgaatcgccccatcatccagccagaaagtgagggagccacggttgatgagagctttgttgtaggtggaccagttggtgattttgaacttttgctttgccacggaacggtctgcgttgtcgggaagatgcgtgatctgatccttcaactcagcaaaagttcgatttattcaacaaagccgccgtcccgtcaagtcagcgtaatgctctgccagtgttacaaccaattaaccaattctgattagaaaaactcatcgagcatcaaatgaaactgcaatttattcatatcaggattatcaataccatatttttgaaaaagccgtttctgtaatgaaggagaaaactcaccgaggcagttccataggatggcaagatcctggtatcggtctgcgattccgactcgtccaacatcaatacaacctattaatttcccctcgtcaaaaataaggttatcaagtgagaaatcaccatgagtgacgactgaatccggtgagaatggcaaaagcttatgcatttctttccagacttgttcaacaggccagccattacgctcgtcatcaaaatcactcgcatcaaccaaaccgttattcattcgtgattgcgcctgagcgagacgaaatacgcgatcgctgttaaaaggacaattacaaacaggaatcgaatgcaaccggcgcaggaacactgccagcgcatcaacaatattttcacctgaatcaggatattcttctaatacctggaatgctgttttcccggggatcgcagtggtgagtaaccatgcatcatcaggagtacggataaaatgcttgatggtcggaagaggcataaattccgtcagccagtttagtctgaccatctcatctgtaacatcattggcaacgctacctttgccatgtttcagaaacaactctggcgcatcgggcttcccatacaatcgatagattgtcgcacctgattgcccgacattatcgcgagcccatttatacccatataaatcagcatccatgttggaatttaatcgcggcctcgagcaagacgtttcccgttgaatatggctcataacaccccttgtattactgtttatgtaagcagacagttttattgttcatgatgatatatttttatcttgtgcaatgtaacatcagagattttgagacacaacgtggctttccccccccccccattattgaagcatttatcagggttattgtctcatgagcggatacatatttgaatgtatttagaaaaataaacaaataggggttccgcgcacatttccccgaaaagtgccacctgacgtctaagaaaccattattatcatgacattaacctataaaaataggcgtatcacgaggccctttcgtctcgcgcgtttcggtgatgacggtgaaaacctctgacacatgcagctcccggagacggtcacagcttgtctgtaagcggatgccgggagcagacaagcccgtcagggcgcgtcagcgggtgttggcgggtgtcggggctggcttaactatgcggcatcagagcagattgtactgagagtgcaccatatgcggtgtgaaataccgcacagatgcgtaaggagaaaataccgcatcagattggctattggccattgcatacgttgtatccatatcataatatgtacatttatattggctcatgtccaacattaccgccatgttgacattgattattgactagttattaatagtaatcaattacggggtcattagttcatagcccatatatggagttccgcgttacataacttacggtaaatggcccgcctggctgaccgcccaacgacccccgcccattgacgtcaataatgacgtatgttcccatagtaacgccaatagggactttccattgacgtcaatgggtggagtatttacggtaaactgcccacttggcagtacatcaagtgtatcatatgccaagtacgccccctattgacgtcaatgacggtaaatggcccgcctggcattatgcccagtacatgaccttatgggactttcctacttggcagtacatctacgtattagtcatcgctattaccatggtgatgcggttttggcagtacatcaatgggcgtggatagcggtttgactcacggggatttccaagtctccaccccattgacgtcaatgggagtttgttttggcaccaaaatcaacgggactttccaaaatgtcgtaacaactccgccccattgacgcaaatgggcggtaggcgtgtacggtgggaggtctatataagcagagctcgtttagtgaaccgtcagatcgcctggagacgccatccacgctgttttgacctccatagaagacaccgggaccgatccagcctccatcggctcgcatctctccttcacgcgcccgccgccctacctgaggccgccatccacgccggttgagtcgcgttctgccgcctcccgcctgtggtgcctcctgaactgcgtccgccgtctaggtaagtttaaagctcaggtcgagaccgggcctttgtccggcgctcccttggagcctacctagactcagccggctctccacgctttgcctgaccctgcttgctcaactctagttaacggtggagggcagtgtagtctgagcagtactcgttgctgccgcgcgcgccaccagacataatagctgacagactaacagactgttcctttccatgggtcttttctgcagtcaccgtcgtcgacacgatccgatatcgccgccaccatgaaggccaatctgctggtgctgctgtgcgccctggccgccgccgatgccgatacaatctgcatcggataccacgccaataatagcacagatacagtggatacagtgctggagaagaatgtgacagtgacacacagcgtgaatctgctggaggatagccacaatggaaagctgtgcagactgaagggaatcgctcctctgcagctgggaaagtgcaatatcgccggatggctgctgggaaatcctgagtgcgatcctctgctgcctgtgagaagctggagctacatcgtggagacacctaatagcgagaatggaatctgctaccctggagattttatcgattacgaggagctgagagagcagctgagcagcgtgagcagctttgagagatttgagatctttcctaaggagagcagctggcctaatcacaatacaacaaagggagtgacagccgcctgcagccacgccggaaagagcagcttttacagaaatctgctgtggctgacagagaaggagggaagctaccctaagctgaagaatagctacgtgaataagaagggaaaggaggtgctggtgctgtggggaatccaccaccctagcaatagcaaggatcagcagaatatctaccagaatgagaatgcctacgtgagcgtggtgacaagcaattacaatagaagatttacacctgagatcgccgagagacctaaggtgagagatcaggccggaagaatgaattactactggacactgctgaagcctggagatacaatcatctttgaggccaatggaaatctgatcgctcctagatacgcctttgccctgagcagaggatttggaagcggaatcatcacaagcaatgccagcatgcacgagtgcaatacaaagtgccagacacctctgggagccatcaatagcagcctgccttttcagaatatccaccctgtgacaatcggagagtgccctaagtacgtgagaagcgccaagctgagaatggtgacaggactgagaaatatccctcagagagagacgagaggactgtttggagccatcgccggatttatcgagggaggatggacaggaatgatcgatggatggtacggataccaccaccagaatgagcagggaagcggatacgccgccgatcagaagagcacacagaatgccatcaatggaatcacaaataaggtgaatagcgtgatcgagaagatgaatatccagtttacagccgtgggaaaggagtttaataagctggagaagagaatggagaatctgaataagaaggtggatgatggatttctggatatctggacatacaatgccgagctgctggtgctgctggagaatgagagaacactggattttcacgatagcaatgtgaagaatctgtacgagaaggtgaagagccagctgaagaataatgccaaggagatcggaaatggatgctttgagttttaccacaagtgcgataatgagtgcatggagagcgtgagaaatggaacatacgattaccctaagtacagcgaggagagcaagctgaatagagagaaggtgagaagcctggtgcctagaggatctcctggcagcggatatattcctgaggcccctagagatggacaggcctatgtgagaaaggatggcgaatgggtgctgctgtctacatttctgggacaccaccatcaccaccattgagcggccgctctagaccaggccctggatccagatctgctgtgccttctagttgccagccatctgttgtttgcccctcccccgtgccttccttgaccctggaaggtgccactcccactgtcctttcctaataaaatgaggaaattgcatcgcattgtctgagtaggtgtcattctattctggggggtggggtggggcaggacagcaagggggaggattgggaagacaatagcaggcatgctggggatgcggtgggctctatgggtacccaggtgctgaagaattgacccggttcctcctgggccagaaagaagcaggcacatccccttctctgtgacacaccctgtccacgcccctggttcttagttccagccccactcataggacactcatagctcaggagggctccgccttcaatcccacccgctaaagtacttggagcggtctctccctccctcatcagcccaccaaaccaaacctagcctccaagagtgggaagaaattaaagcaagataggctattaagtgcagagggagagaaaatgcctccaacatgtgaggaagtaatgagagaaatcatagaattttaaggccatgatttaaggccatcatggccttaatcttccgcttcctcgctcactgactcgctgcgctcggtcgttcggctgcggcgagcggtatcagctcactcaaaggcggtaatacggttatccacagaatcaggggataacgcaggaaagaacatgtgagcaaaaggccagcaaaaggccaggaaccgtaaaaaggccgcgttgctggcgtttttccataggctccgcccccctgacgagcatcacaaaaatcgacgctcaagtcagaggtggcgaaacccgacaggactataaagataccaggcgtttccccctggaagctccctcgtgcgctctcctgttccgaccctgccgcttaccggatacctgtccgcctttctcccttcgggaagcgtggcgctttctcatagctcacgctgtaggtatctcagttcggtgtaggtcgttcgctccaagctgggctgtgtgcacgaaccccccgttcagcccgaccgctgcgccttatccggtaactatcgtcttgagtccaacccggtaagacacgacttatcgccactggcagcagccactggtaacaggattagcagagcgaggtatgtaggcggtgctacagagttcttgaagtggtggcctaactacggctacactagaagaacagtatttggtatctgcgctctgctgaagccagttaccttcggaaaaagagttggtagctcttgatccggcaaacaaaccaccgctggtagcggtggtttttttgtttgcaagcagcagattacgcgcagaaaaaaaggatctcaagaagatcctttgatcttttctacggggtctgacgctcagtggaacgaaaactcacgttaagggattttggtcatgagattatcaaaaaggatcttcacctagatccttttaaattaaaaatgaagttttaaatcaatctaaagtatatatgagtaaacttggtctgacagttaccaatgcttaatcagtgaggcacctatctcagcgatctgtctatttcgttcatccatagttgcctgactcggggggggggggcgctgaggtctgcctcgtgaagaaggtgttgctgactcataccaggcctgaatcgccccatcatccagccagaaagtgagggagccacggttgatgagagctttgttgtaggtggaccagttggtgattttgaacttttgctttgccacggaacggtctgcgttgtcgggaagatgcgtgatctgatccttcaactcagcaaaagttcgatttattcaacaaagccgccgtcccgtcaagtcagcgtaatgctctgccagtgttacaaccaattaaccaattctgattagaaaaactcatcgagcatcaaatgaaactgcaatttattcatatcaggattatcaataccatatttttgaaaaagccgtttctgtaatgaaggagaaaactcaccgaggcagttccataggatggcaagatcctggtatcggtctgcgattccgactcgtccaacatcaatacaacctattaatttcccctcgtcaaaaataaggttatcaagtgagaaatcaccatgagtgacgactgaatccggtgagaatggcaaaagcttatgcatttctttccagacttgttcaacaggccagccattacgctcgtcatcaaaatcactcgcatcaaccaaaccgttattcattcgtgattgcgcctgagcgagacgaaatacgcgatcgctgttaaaaggacaattacaaacaggaatcgaatgcaaccggcgcaggaacactgccagcgcatcaacaatattttcacctgaatcaggatattcttctaatacctggaatgctgttttcccggggatcgcagtggtgagtaaccatgcatcatcaggagtacggataaaatgcttgatggtcggaagaggcataaattccgtcagccagtttagtctgaccatctcatctgtaacatcattggcaacgctacctttgccatgtttcagaaacaactctggcgcatcgggcttcccatacaatcgatagattgtcgcacctgattgcccgacattatcgcgagcccatttatacccatataaatcagcatccatgttggaatttaatcgcggcctcgagcaagacgtttcccgttgaatatggctcataacaccccttgtattactgtttatgtaagcagacagttttattgttcatgatgatatatttttatcttgtgcaatgtaacatcagagattttgagacacaacgtggctttccccccccccccattattgaagcatttatcagggttattgtctcatgagcggatacatatttgaatgtatttagaaaaataaacaaataggggttccgcgcacatttccccgaaaagtgccacctgacgtctaagaaaccattattatcatgacattaacctataaaaataggcgtatcacgaggccctttcgtc

SEQ ID NO: 134 - DNA, 6108 bp, Artificial Sequence
  Plasmid DNA: VRC 7742
tcgcgcgtttcggtgatgacggtgaaaacctctgacacatgcagctcccggagacggtcacagcttgtctgtaagcggatgccgggagcagacaagcccgtcagggcgcgtcagcgggtgttggcgggtgtcggggctggcttaactatgcggcatcagagcagattgtactgagagtgcaccatatgcggtgtgaaataccgcacagatgcgtaaggagaaaataccgcatcagattggctattggccattgcatacgttgtatccatatcataatatgtacatttatattggctcatgtccaacattaccgccatgttgacattgattattgactagttattaatagtaatcaattacggggtcattagttcatagcccatatatggagttccgcgttacataacttacggtaaatggcccgcctggctgaccgcccaacgacccccgcccattgacgtcaataatgacgtatgttcccatagtaacgccaatagggactttccattgacgtcaatgggtggagtatttacggtaaactgcccacttggcagtacatcaagtgtatcatatgccaagtacgccccctattgacgtcaatgacggtaaatggcccgcctggcattatgcccagtacatgaccttatgggactttcctacttggcagtacatctacgtattagtcatcgctattaccatggtgatgcggttttggcagtacatcaatgggcgtggatagcggtttgactcacggggatttccaagtctccaccccattgacgtcaatgggagtttgttttggcaccaaaatcaacgggactttccaaaatgtcgtaacaactccgccccattgacgcaaatgggcggtaggcgtgtacggtgggaggtctatataagcagagctcgtttagtgaaccgtcagatcgcctggagacgccatccacgctgttttgacctccatagaagacaccgggaccgatccagcctccatcggctcgcatctctccttcacgcgcccgccgccctacctgaggccgccatccacgccggttgagtcgcgttctgccgcctcccgcctgtggtgcctcctgaactgcgtccgccgtctaggtaagtttaaagctcaggtcgagaccgggcctttgtccggcgctcccttggagcctacctagactcagccggctctccacgctttgcctgaccctgcttgctcaactctagttaacggtggagggcagtgtagtctgagcagtactcgttgctgccgcgcgcgccaccagacataatagctgacagactaacagactgttcctttccatgggtcttttctgcagtcaccgtcgtcgacacgatccgatatcgccgccaccatgaaggccaatctgctggtgctgctgtgcgccctggccgccgccgatgccgatacaatctgcatcggataccacgccaataatagcacagatacagtggatacagtgctggagaagaatgtgacagtgacacacagcgtgaatctgctggaggatagccacaatggaaagctgtgcagactgaagggaatcgctcctctgcagctgggaaagtgcaatatcgccggatggctgctgggaaatcctgagtgcgatcctctgctgcctgtgagaagctggagctacatcgtggagacacctaatagcgagaatggaatctgctaccctggagattttatcgattacgaggagctgagagagcagctgagcagcgtgagcagctttgagagatttgagatctttcctaaggagagcagctggcctaatcacaatacaacaaagggagtgacagccgcctgcagccacgccggaaagagcagcttttacagaaatctgctgtggctgacagagaaggagggaagctaccctaagctgaagaatagctacgtgaataagaagggaaaggaggtgctggtgctgtggggaatccaccaccctagcaatagcaaggatcagcagaatatctaccagaatgagaatgcctacgtgagcgtggtgacaagcaattacaatagaagatttacacctgagatcgccgagagacctaaggtgagagatcaggccggaagaatgaattactactggacactgctgaagcctggagatacaatcatctttgaggccaatggaaatctgatcgctcctagatacgcctttgccctgagcagaggatttggaagcggaatcatcacaagcaatgccagcatgcacgagtgcaatacaaagtgccagacacctctgggagccatcaatagcagcctgccttttcagaatatccaccctgtgacaatcggagagtgccctaagtacgtgagaagcgccaagctgagaatggtgacaggactgagaaatatccctcagagagagacgagaggactgtttggagccatcgccggatttatcgagggaggatggacaggaatgatcgatggatggtacggataccaccaccagaatgagcagggaagcggatacgccgccgatcagaagagcacacagaatgccatcaatggaatcacaaataaggtgaatagcgtgatcgagaagatgaatatccagtttacagccgtgggaaaggagtttaataagctggagaagagaatggagaatctgaataagaaggtggatgatggatttctggatatctggacatacaatgccgagctgctggtgctgctggagaatgagagaacactggattttcacgatagcaatgtgaagaatctgtacgagaaggtgaagagccagctgaagaataatgccaaggagatcggaaatggatgctttgagttttaccacaagtgcgataatgagtgcatggagagcgtgagaaatggaacatacgattaccctaagtacagcgaggagagcaagctgaatagagagaaggtgagaagcctggtgcctagaggatctcctggcagcggatatattcctgaggcccctagagatggacaggcctatgtgagaaaggatggcgaatgggtgctgctgtctacatttctgggacaccaccatcaccaccattgagcggccgctctagaccaggccctggatccagatctgctgtgccttctagttgccagccatctgttgtttgcccctcccccgtgccttccttgaccctggaaggtgccactcccactgtcctttcctaataaaatgaggaaattgcatcgcattgtctgagtaggtgtcattctattctggggggtggggtggggcaggacagcaagggggaggattgggaagacaatagcaggcatgctggggatgcggtgggctctatgggtacccaggtgctgaagaattgacccggttcctcctgggccagaaagaagcaggcacatccccttctctgtgacacaccctgtccacgcccctggttcttagttccagccccactcataggacactcatagctcaggagggctccgccttcaatcccacccgctaaagtacttggagcggtctctccctccctcatcagcccaccaaaccaaacctagcctccaagagtgggaagaaattaaagcaagataggctattaagtgcagagggagagaaaatgcctccaacatgtgaggaagtaatgagagaaatcatagaattttaaggccatgatttaaggccatcatggccttaatcttccgcttcctcgctcactgactcgctgcgctcggtcgttcggctgcggcgagcggtatcagctcactcaaaggcggtaatacggttatccacagaatcaggggataacgcaggaaagaacatgtgagcaaaaggccagcaaaaggccaggaaccgtaaaaaggccgcgttgctggcgtttttccataggctccgcccccctgacgagcatcacaaaaatcgacgctcaagtcagaggtggcgaaacccgacaggactataaagataccaggcgtttccccctggaagctccctcgtgcgctctcctgttccgaccctgccgcttaccggatacctgtccgcctttctcccttcgggaagcgtggcgctttctcatagctcacgctgtaggtatctcagttcggtgtaggtcgttcgctccaagctgggctgtgtgcacgaaccccccgttcagcccgaccgctgcgccttatccggtaactatcgtcttgagtccaacccggtaagacacgacttatcgccactggcagcagccactggtaacaggattagcagagcgaggtatgtaggcggtgctacagagttcttgaagtggtggcctaactacggctacactagaagaacagtatttggtatctgcgctctgctgaagccagttaccttcggaaaaagagttggtagctcttgatccggcaaacaaaccaccgctggtagcggtggtttttttgtttgcaagcagcagattacgcgcagaaaaaaaggatctcaagaagatcctttgatcttttctacggggtctgacgctcagtggaacgaaaactcacgttaagggattttggtcatgagattatcaaaaaggatcttcacctagatccttttaaattaaaaatgaagttttaaatcaatctaaagtatatatgagtaaacttggtctgacagttaccaatgcttaatcagtgaggcacctatctcagcgatctgtctatttcgttcatccatagttgcctgactcggggggggggggcgctgaggtctgcctcgtgaagaaggtgttgctgactcataccaggcctgaatcgccccatcatccagccagaaagtgagggagccacggttgatgagagctttgttgtaggtggaccagttggtgattttgaacttttgctttgccacggaacggtctgcgttgtcgggaagatgcgtgatctgatccttcaactcagcaaaagttcgatttattcaacaaagccgccgtcccgtcaagtcagcgtaatgctctgccagtgttacaaccaattaaccaattctgattagaaaaactcatcgagcatcaaatgaaactgcaatttattcatatcaggattatcaataccatatttttgaaaaagccgtttctgtaatgaaggagaaaactcaccgaggcagttccataggatggcaagatcctggtatcggtctgcgattccgactcgtccaacatcaatacaacctattaatttcccctcgtcaaaaataaggttatcaagtgagaaatcaccatgagtgacgactgaatccggtgagaatggcaaaagcttatgcatttctttccagacttgttcaacaggccagccattacgctcgtcatcaaaatcactcgcatcaaccaaaccgttattcattcgtgattgcgcctgagcgagacgaaatacgcgatcgctgttaaaaggacaattacaaacaggaatcgaatgcaaccggcgcaggaacactgccagcgcatcaacaatattttcacctgaatcaggatattcttctaatacctggaatgctgttttcccggggatcgcagtggtgagtaaccatgcatcatcaggagtacggataaaatgcttgatggtcggaagaggcataaattccgtcagccagtttagtctgaccatctcatctgtaacatcattggcaacgctacctttgccatgtttcagaaacaactctggcgcatcgggcttcccatacaatcgatagattgtcgcacctgattgcccgacattatcgcgagcccatttatacccatataaatcagcatccatgttggaatttaatcgcggcctcgagcaagacgtttcccgttgaatatggctcataacaccccttgtattactgtttatgtaagcagacagttttattgttcatgatgatatatttttatcttgtgcaatgtaacatcagagattttgagacacaacgtggctttccccccccccccattattgaagcatttatcagggttattgtctcatgagcggatacatatttgaatgtatttagaaaaataaacaaataggggttccgcgcacatttccccgaaaagtgccacctgacgtctaagaaaccattattatcatgacattaacctataaaaataggcgtatcacgaggccctttcgtc

SEQ ID NO: 135 - DNA, 6105 bp, Artificial Sequence
  Plasmid DNA: VRC 7721
tcgcgcgtttcggtgatgacggtgaaaacctctgacacatgcagctcccggagacggtcacagcttgtctgtaagcggatgccgggagcagacaagcccgtcagggcgcgtcagcgggtgttggcgggtgtcggggctggcttaactatgcggcatcagagcagattgtactgagagtgcaccatatgcggtgtgaaataccgcacagatgcgtaaggagaaaataccgcatcagattggctattggccattgcatacgttgtatccatatcataatatgtacatttatattggctcatgtccaacattaccgccatgttgacattgattattgactagttattaatagtaatcaattacgggaacttccatagcccatatatggagttccgcgttacataacttacgggaatttccaaacctggctgaccgcccaacgacccccgcccattgacgtcaataatgacgtatgttcccatagtaacgccaatagggaacttccattgacgtcaatgggtggagtatttacggtaaactgcccacttgggaatttccaagtgtatcatatgccaagtacgccccctattgacgtcaatgacgggaacttccataagcttgcattatgcccagtacatgaccttatgggaatttcctacttggcagtacatctacgtattagtcatcgctattaccatggtgatgcggttttggcagtacatcaatgggcgtggatagcggtttgactcacgggaacttccaagtctccaccccattgacgtcaatgggagtttgttttgactcaccaaaatcaacgggaattcccaaaatgtcgtaacaactccgccccattgacgcaaatgggcggtaggcgtgtacggtgggaggtctatataagcagagctcgtttagtgaaccgtcagatcgcctggagacgccatccacgctgttttgacctccatagaagacaccgggaccgatccagcctccatcggctcgcatctctccttcacgcgcccgccgccttacctgaggccgccatccacgccggttgagtcgcgttctgccgcctcccgcctgtggtgcctcctgaactacgtccgccgtctaggtaagtttagagctcaggtcgagaccgggcctttgtccggcgctcccttggagcctacctagactcagccggctctccacgctttgcctgaccctgcttgctcaactctagttaacggtggagggcagtgtagtctgagcagtactcgttgctgccgcgcgcgccaccagacataatagctgacagactaacagactgttcctttccatgggtcttttctgcagtcaccgtcgtcgacacgtgtgatcagatatcgcggccgctctagagatatcgccaccatggagaagatcgtgctgctgttcgccatcgtgagcctggtgaagagcgatcagatctgcatcggataccacgccaataatagcacagagcaggtggatacaatcatggagaagaatgtgacagtgacacacgcccaggatatcctggagaagacacacaatggaaagctgtgcgatctggatggagtgaagcctctgatcctgagagattgcagcgtggccggatggctgctgggaaatcctatgtgcgatgagttcatcaatgtgcctgagtggagctacatcgtggagaaggccaatcctgtgaatgatctgtgctaccctggagatttcaatgattacgaggagctgaagcacctgctgagcagaatcaatcacttcgagaagatccagatcatccctaagagcagctggagcagccacgaggccagcctgggagtgagcagcgcctgcccttaccagagaaagagcagcttcttcagaaatgtggtgtggctgatcaagaagaatagcacataccctacaatcaagagaagctacaataatacaaatcaggaggatctgctggtgctgtggggaatccaccaccctaatgatgccgccgagcagacaaagctgtaccagaatcctacaacatacatcagcgtgggaacaagcacactgaatcagagactggtgcctagaatcgccacaagaagcaaggtgaatggacagagcggaagaatggagttcttctggacaatcctgaagcctaatgatgccatcaatttcgagagcaatggaaatttcatcgctcctgagtacgcctacaagatcgtgaagaagggagatagcacaatcatgaagagcgagctggagtacggaaattgcaatacaaagtgccagacacctatgggagccatcaatagcagcatgcctttccacaatatccaccctctgacaatcggagagtgccctaagtacgtgaagagcaatagactggtgctggccacaggactgagaaatagccctcagagagagacgagaggactgttcggagccatcgccggattcatcgagggaggatggcagggaatggtggatggatggtacggataccaccacagcaatgagcagggaagcggatacgccgccgataaggagagcacacagaaggccatcgatggagtgacaaataaggtgaatagcatcatcgataagatgaatacacagttcgaggccgtgggaagagagttcaataatctggagagaagaatcgagaatctgaataagaagatggaggatggattcctggatgtgtggacatacaatgccgagctgctggtgctgatggagaatgagagaacactggatttccacgatagcaatgtgaagaatctgtacgataaggtgagactgcagctgagagataatgccaaggagctgggaaatggatgcttcgagttctaccacaagtgcgataatgagtgcatggagagcgtgagaaatggaacatacgattaccctcagtacagcgaggaggccagactgaagagagaggagatcagcggagtgaagctggagagcatcggaatctaccagatcctgagcatctacagcacagtggccagcagcctggccctggccatcatggtggccggactgagcctgtggatgtgcagcaatggaagcctgcagtgcagaatctgcatctgagcggccgcggatccagatctgctgtgccttctagttgccagccatctgttgtttgcccctcccccgtgccttccttgaccctggaaggtgccactcccactgtcctttcctaataaaatgaggaaattgcatcgcattgtctgagtaggtgtcattctattctggggggtggggtggggcaggacagcaagggggaggattgggaagacaatagcaggcatgctggggatgcggtgggctctatgggtacccaggtgctgaagaattgacccggttcctcctgggccagaaagaagcaggcacatccccttctctgtgacacaccctgtccacgcccctggttcttagttccagccccactcataggacactcatagctcaggagggctccgccttcaatcccacccgctaaagtacttggagcggtctctccctccctcatcagcccaccaaaccaaacctagcctccaagagtgggaagaaattaaagcaagataggctattaagtgcagagggagagaaaatgcctccaacatgtgaggaagtaatgagagaaatcatagaattttaaggccatcatggccttaatcttccgcttcctcgctcactgactcgctgcgctcggtcgttcggctgcggcgagcggtatcagctcactcaaaggcggtaatacggttatccacagaatcaggggataacgcaggaaagaacatgtgagcaaaaggccagcaaaaggccaggaaccgtaaaaaggccgcgttgctggcgtttttccataggctccgcccccctgacgagcatcacaaaaatcgacgctcaagtcagaggtggcgaaacccgacaggactataaagataccaggcgtttccccctggaagctccctcgtgcgctctcctgttccgaccctgccgcttaccggatacctgtccgcctttctcccttcgggaagcgtggcgctttctcatagctcacgctgtaggtatctcagttcggtgtaggtcgttcgctccaagctgggctgtgtgcacgaaccccccgttcagcccgaccgctgcgccttatccggtaactatcgtcttgagtccaacccggtaagacacgacttatcgccactggcagcagccactggtaacaggattagcagagcgaggtatgtaggcggtgctacagagttcttgaagtggtggcctaactacggctacactagaagaacagtatttggtatctgcgctctgctgaagccagttaccttcggaaaaagagttggtagctcttgatccggcaaacaaaccaccgctggtagcggtggtttttttgtttgcaagcagcagattacgcgcagaaaaaaaggatctcaagaagatcctttgatcttttctacggggtctgacgctcagtggaacgaaaactcacgttaagggattttggtcatgagattatcaaaaaggatcttcacctagatccttttaaattaaaaatgaagttttaaatcaatctaaagtatatatgagtaaacttggtctgacagttaccaatgcttaatcagtgaggcacctatctcagcgatctgtctatttcgttcatccatagttgcctgactcggggggggggggcgctgaggtctgcctcgtgaagaaggtgttgctgactcataccaggcctgaatcgccccatcatccagccagaaagtgagggagccacggttgatgagagctttgttgtaggtggaccagttggtgattttgaacttttgctttgccacggaacggtctgcgttgtcgggaagatgcgtgatctgatccttcaactcagcaaaagttcgatttattcaacaaagccgccgtcccgtcaagtcagcgtaatgctctgccagtgttacaaccaattaaccaattctgattagaaaaactcatcgagcatcaaatgaaactgcaatttattcatatcaggattatcaataccatatttttgaaaaagccgtttctgtaatgaaggagaaaactcaccgaggcagttccataggatggcaagatcctggtatcggtctgcgattccgactcgtccaacatcaatacaacctattaatttcccctcgtcaaaaataaggttatcaagtgagaaatcaccatgagtgacgactgaatccggtgagaatggcaaaagcttatgcatttctttccagacttgttcaacaggccagccattacgctcgtcatcaaaatcactcgcatcaaccaaaccgttattcattcgtgattgcgcctgagcgagacgaaatacgcgatcgctgttaaaaggacaattacaaacaggaatcgaatgcaaccggcgcaggaacactgccagcgcatcaacaatattttcacctgaatcaggatattcttctaatacctggaatgctgttttcccggggatcgcagtggtgagtaaccatgcatcatcaggagtacggataaaatgcttgatggtcggaagaggcataaattccgtcagccagtttagtctgaccatctcatctgtaacatcattggcaacgctacctttgccatgtttcagaaacaactctggcgcatcgggcttcccatacaatcgatagattgtcgcacctgattgcccgacattatcgcgagcccatttatacccatataaatcagcatccatgttggaatttaatcgcggcctcgagcaagacgtttcccgttgaatatggctcataacaccccttgtattactgtttatgtaagcagacagttttattgttcatgatgatatatttttatcttgtgcaatgtaacatcagagattttgagacacaacgtggctttccccccccccccattattgaagcatttatcagggttattgtctcatgagcggatacatatttgaatgtatttagaaaaataaacaaataggggttccgcgcacatttccccgaaaagtgccacctgacgtctaagaaaccattattatcatgacattaacctataaaaataggcgtatcacgaggccctttcgtc

SEQ ID NO: 136 - DNA, 6147 bp, Artificial Sequence
  Plasmid DNA: VRC 7743
tcgcgcgtttcggtgatgacggtgaaaacctctgacacatgcagctcccggagacggtcacagcttgtctgtaagcggatgccgggagcagacaagcccgtcagggcgcgtcagcgggtgttggcgggtgtcggggctggcttaactatgcggcatcagagcagattgtactgagagtgcaccatatgcggtgtgaaataccgcacagatgcgtaaggagaaaataccgcatcagattggctattggccattgcatacgttgtatccatatcataatatgtacatttatattggctcatgtccaacattaccgccatgttgacattgattattgactagttattaatagtaatcaattacggggtcattagttcatagcccatatatggagttccgcgttacataacttacggtaaatggcccgcctggctgaccgcccaacgacccccgcccattgacgtcaataatgacgtatgttcccatagtaacgccaatagggactttccattgacgtcaatgggtggagtatttacggtaaactgcccacttggcagtacatcaagtgtatcatatgccaagtacgccccctattgacgtcaatgacggtaaatggcccgcctggcattatgcccagtacatgaccttatgggactttcctacttggcagtacatctacgtattagtcatcgctattaccatggtgatgcggttttggcagtacatcaatgggcgtggatagcggtttgactcacggggatttccaagtctccaccccattgacgtcaatgggagtttgttttggcaccaaaatcaacgggactttccaaaatgtcgtaacaactccgccccattgacgcaaatgggcggtaggcgtgtacggtgggaggtctatataagcagagctcgtttagtgaaccgtcagatcgcctggagacgccatccacgctgttttgacctccatagaagacaccgggaccgatccagcctccatcggctcgcatctctccttcacgcgcccgccgccctacctgaggccgccatccacgccggttgagtcgcgttctgccgcctcccgcctgtggtgcctcctgaactgcgtccgccgtctaggtaagtttaaagctcaggtcgagaccgggcctttgtccggcgctcccttggagcctacctagactcagccggctctccacgctttgcctgaccctgcttgctcaactctagttaacggtggagggcagtgtagtctgagcagtactcgttgctgccgcgcgcgccaccagacataatagctgacagactaacagactgttcctttccatgggtcttttctgcagtcaccgtcgtcgacacgatccgatatcgccgccaccatgaaggccaatctgctggtgctgctgtgcgccctggccgccgccgatgccgatacaatctgcatcggataccacgccaataatagcacagatacagtggatacagtgctggagaagaatgtgacagtgacacacagcgtgaatctgctggaggatagccacaatggaaagctgtgcagactgaagggaatcgctcctctgcagctgggaaagtgcaatatcgccggatggctgctgggaaatcctgagtgcgatcctctgctgcctgtgagaagctggagctacatcgtggagacacctaatagcgagaatggaatctgctaccctggagattttatcgattacgaggagctgagagagcagctgagcagcgtgagcagctttgagagatttgagatctttcctaaggagagcagctggcctaatcacaatacaacaaagggagtgacagccgcctgcagccacgccggaaagagcagcttttacagaaatctgctgtggctgacagagaaggagggaagctaccctaagctgaagaatagctacgtgaataagaagggaaaggaggtgctggtgctgtggggaatccaccaccctagcaatagcaaggatcagcagaatatctaccagaatgagaatgcctacgtgagcgtggtgacaagcaattacaatagaagatttacacctgagatcgccgagagacctaaggtgagagatcaggccggaagaatgaattactactggacactgctgaagcctggagatacaatcatctttgaggccaatggaaatctgatcgctcctagatacgcctttgccctgagcagaggatttggaagcggaatcatcacaagcaatgccagcatgcacgagtgcaatacaaagtgccagacacctctgggagccatcaatagcagcctgccttttcagaatatccaccctgtgacaatcggagagtgccctaagtacgtgagaagcgccaagctgagaatggtgacaggactgagaaatatccctcagagagagacgagaggactgtttggagccatcgccggatttatcgagggaggatggacaggaatgatcgatggatggtacggataccaccaccagaatgagcagggaagcggatacgccgccgatcagaagagcacacagaatgccatcaatggaatcacaaataaggtgaatagcgtgatcgagaagatgaatatccagtttacagccgtgggaaaggagtttaataagctggagaagagaatggagaatctgaataagaaggtggatgatggatttctggatatctggacatacaatgccgagctgctggtgctgctggagaatgagagaacactggattttcacgatagcaatgtgaagaatctgtacgagaaggtgaagagccagctgaagaataatgccaaggagatcggaaatggatgctttgagttttaccacaagtgcgataatgagtgcatggagagcgtgagaaatggaacatacgattaccctaagtacagcgaggagagcaagctgaatagagagaaggtggatggagtgaagctggagagcatgggaatctaccagatcagaagcctggtgcctagaggatctcctggcagcggatatattcctgaggcccctagagatggacaggcctatgtgagaaaggatggcgaatgggtgctgctgtctacatttctgggacaccaccatcaccaccattgagcggccgctctagaccaggccctggatccagatctgctgtgccttctagttgccagccatctgttgtttgcccctcccccgtgccttccttgaccctggaaggtgccactcccactgtcctttcctaataaaatgaggaaattgcatcgcattgtctgagtaggtgtcattctattctggggggtggggtggggcaggacagcaagggggaggattgggaagacaatagcaggcatgctggggatgcggtgggctctatgggtacccaggtgctgaagaattgacccggttcctcctgggccagaaagaagcaggcacatccccttctctgtgacacaccctgtccacgcccctggttcttagttccagccccactcataggacactcatagctcaggagggctccgccttcaatcccacccgctaaagtacttggagcggtctctccctccctcatcagcccaccaaaccaaacctagcctccaagagtgggaagaaattaaagcaagataggctattaagtgcagagggagagaaaatgcctccaacatgtgaggaagtaatgagagaaatcatagaattttaaggccatgatttaaggccatcatggccttaatcttccgcttcctcgctcactgactcgctgcgctcggtcgttcggctgcggcgagcggtatcagctcactcaaaggcggtaatacggttatccacagaatcaggggataacgcaggaaagaacatgtgagcaaaaggccagcaaaaggccaggaaccgtaaaaaggccgcgttgctggcgtttttccataggctccgcccccctgacgagcatcacaaaaatcgacgctcaagtcagaggtggcgaaacccgacaggactataaagataccaggcgtttccccctggaagctccctcgtgcgctctcctgttccgaccctgccgcttaccggatacctgtccgcctttctcccttcgggaagcgtggcgctttctcatagctcacgctgtaggtatctcagttcggtgtaggtcgttcgctccaagctgggctgtgtgcacgaaccccccgttcagcccgaccgctgcgccttatccggtaactatcgtcttgagtccaacccggtaagacacgacttatcgccactggcagcagccactggtaacaggattagcagagcgaggtatgtaggcggtgctacagagttcttgaagtggtggcctaactacggctacactagaagaacagtatttggtatctgcgctctgctgaagccagttaccttcggaaaaagagttggtagctcttgatccggcaaacaaaccaccgctggtagcggtggtttttttgtttgcaagcagcagattacgcgcagaaaaaaaggatctcaagaagatcctttgatcttttctacggggtctgacgctcagtggaacgaaaactcacgttaagggattttggtcatgagattatcaaaaaggatcttcacctagatccttttaaattaaaaatgaagttttaaatcaatctaaagtatatatgagtaaacttggtctgacagttaccaatgcttaatcagtgaggcacctatctcagcgatctgtctatttcgttcatccatagttgcctgactcggggggggggggcgctgaggtctgcctcgtgaagaaggtgttgctgactcataccaggcctgaatcgccccatcatccagccagaaagtgagggagccacggttgatgagagctttgttgtaggtggaccagttggtgattttgaacttttgctttgccacggaacggtctgcgttgtcgggaagatgcgtgatctgatccttcaactcagcaaaagttcgatttattcaacaaagccgccgtcccgtcaagtcagcgtaatgctctgccagtgttacaaccaattaaccaattctgattagaaaaactcatcgagcatcaaatgaaactgcaatttattcatatcaggattatcaataccatatttttgaaaaagccgtttctgtaatgaaggagaaaactcaccgaggcagttccataggatggcaagatcctggtatcggtctgcgattccgactcgtccaacatcaatacaacctattaatttcccctcgtcaaaaataaggttatcaagtgagaaatcaccatgagtgacgactgaatccggtgagaatggcaaaagcttatgcatttctttccagacttgttcaacaggccagccattacgctcgtcatcaaaatcactcgcatcaaccaaaccgttattcattcgtgattgcgcctgagcgagacgaaatacgcgatcgctgttaaaaggacaattacaaacaggaatcgaatgcaaccggcgcaggaacactgccagcgcatcaacaatattttcacctgaatcaggatattcttctaatacctggaatgctgttttcccggggatcgcagtggtgagtaaccatgcatcatcaggagtacggataaaatgcttgatggtcggaagaggcataaattccgtcagccagtttagtctgaccatctcatctgtaacatcattggcaacgctacctttgccatgtttcagaaacaactctggcgcatcgggcttcccatacaatcgatagattgtcgcacctgattgcccgacattatcgcgagcccatttatacccatataaatcagcatccatgttggaatttaatcgcggcctcgagcaagacgtttcccgttgaatatggctcataacaccccttgtattactgtttatgtaagcagacagttttattgttcatgatgatatatttttatcttgtgcaatgtaacatcagagattttgagacacaacgtggctttccccccccccccattattgaagcatttatcagggttattgtctcatgagcggatacatatttgaatgtatttagaaaaataaacaaataggggttccgcgcacatttccccgaaaagtgccacctgacgtctaagaaaccattattatcatgacattaacctataaaaataggcgtatcacgaggccctttcgtc

SEQ ID NO: 137 - DNA, 6134 bp, Artificial Sequence
  Plasmid DNA: VRC 7744
tcgcgcgtttcggtgatgacggtgaaaacctctgacacatgcagctcccggagacggtcacagcttgtctgtaagcggatgccgggagcagacaagcccgtcagggcgcgtcagcgggtgttggcgggtgtcggggctggcttaactatgcggcatcagagcagattgtactgagagtgcaccatatgcggtgtgaaataccgcacagatgcgtaaggagaaaataccgcatcagattggctattggccattgcatacgttgtatccatatcataatatgtacatttatattggctcatgtccaacattaccgccatgttgacattgattattgactagttattaatagtaatcaattacggggtcattagttcatagcccatatatggagttccgcgttacataacttacggtaaatggcccgcctggctgaccgcccaacgacccccgcccattgacgtcaataatgacgtatgttcccatagtaacgccaatagggactttccattgacgtcaatgggtggagtatttacggtaaactgcccacttggcagtacatcaagtgtatcatatgccaagtacgccccctattgacgtcaatgacggtaaatggcccgcctggcattatgcccagtacatgaccttatgggactttcctacttggcagtacatctacgtattagtcatcgctattaccatggtgatgcggttttggcagtacatcaatgggcgtggatagcggtttgactcacggggatttccaagtctccaccccattgacgtcaatgggagtttgttttggcaccaaaatcaacgggactttccaaaatgtcgtaacaactccgccccattgacgcaaatgggcggtaggcgtgtacggtgggaggtctatataagcagagctcgtttagtgaaccgtcagatcgcctggagacgccatccacgctgttttgacctccatagaagacaccgggaccgatccagcctccatcggctcgcatctctccttcacgcgcccgccgccctacctgaggccgccatccacgccggttgagtcgcgttctgccgcctcccgcctgtggtgcctcctgaactgcgtccgccgtctaggtaagtttaaagctcaggtcgagaccgggcctttgtccggcgctcccttggagcctacctagactcagccggctctccacgctttgcctgaccctgcttgctcaactctagttaacggtggagggcagtgtagtctgagcagtactcgttgctgccgcgcgcgccaccagacataatagctgacagactaacagactgttcctttccatgggtcttttctgcagtcaccgtcgtcgacacgtgtgatcagatatcgcggccgctctagagatatcgccaccatggagaaaacagtgctgctgctggccacagtgtctctggtgaagagcgaccagatctgtattggctaccacgccaacaattctacagagcaggtggacaccatcatggagaagaatgtgacagtgacacacgcccaggatattctggagagaacccacaatggcaagctgtgtgatctgaatggcgtgaagcctctgatcctgagagattgttctgtggccggatggctgctgggaaatcccatgtgtgacgagttcatcaatgtgcctgagtggagctatatcgtggagaaagccagccctgccaatgatctgtgttaccccggcaacttcaacgattacgaggagctgaaacacctgctgtccaggatcaatcacttcgagaagatccagatcatccctaagagcagctggtctaatcacgatgccagctctggagtgtctagcgcctgtccttatctgggcagaagcagcttcttcagaaacgtggtgtggctgatcaagaagaatagcgcctaccccacaatcaagcggagctacaacaacaccaaccaggaagatctgctggtgctgtggggaattcaccaccctaatgatgccgccgaacagacaaagctgtaccagaaccccaccacatatatctctgtgggcaccagcacactgaatcagagactggtgcctgagattgccacaagacctaaggtgaacggccagtctggcagaatggagttcttctggaccatcctgaagccaaacgacgccatcaacttcgagagcaacggcaatttcatcgcccctgagtacgcctataagatcgtgaagaagggcgatagcaccatcatgaagagcgagctggagtacggcaactgtaataccaagtgccagacacctatgggcgccatcaatagctctatgcccttccacaatatccaccctctgacaatcggcgagtgtcctaagtacgtgaagagcaacagactggtgctggccaccggactgagaaatacacctcagagagagcggagacggaagaaaagaggactgtttggagccatcgccggctttattgagggaggatggcagggaatggtggatggctggtatggctatcaccacagcaatgagcagggatctggatatgccgccgataaggagtctacacagaaggccattgacggcgtgacaaacaaggtgaacagcatcatcaacaagatgaacacccagtttgaagctgtgggcagagagttcaacaacctggagcggagaatcgagaacctgaacaagaagatggaggacggctttctggatgtgtggacctataatgccgaactgctcgtgctgatggagaacgagagaaccctggatttccacgacagcaacgtgaagaacctgtacgacaaagtgagactgcagctgagagataatgccaaggaactgggcaatggctgcttcgagttctaccacaagtgtgacaacgagtgtatggagagcgtgaagaacggcacctacgattaccctcagtactctgaggaagccagactgaacagagaggagatctctggcgtgaaactggagagcatgggcacataccagatcctgagcatctatagcacagtggcctcttctctggccctggccattatggtggccggactgtctctgtggatgtgtagcaatggcagcctgcagtgcagaatctgtatctgatgaacacgtgggatccagatctgctgtgccttctagttgccagccatctgttgtttgcccctcccccgtgccttccttgaccctggaaggtgccactcccactgtcctttcctaataaaatgaggaaattgcatcgcattgtctgagtaggtgtcattctattctggggggtggggtggggcaggacagcaagggggaggattgggaagacaatagcaggcatgctggggatgcggtgggctctatgggtacccaggtgctgaagaattgacccggttcctcctgggccagaaagaagcaggcacatccccttctctgtgacacaccctgtccacgcccctggttcttagttccagccccactcataggacactcatagctcaggagggctccgccttcaatcccacccgctaaagtacttggagcggtctctccctccctcatcagcccaccaaaccaaacctagcctccaagagtgggaagaaattaaagcaagataggctattaagtgcagagggagagaaaatgcctccaacatgtgaggaagtaatgagagaaatcatagaattttaaggccatgatttaaggccatcatggccttaatcttccgcttcctcgctcactgactcgctgcgctcggtcgttcggctgcggcgagcggtatcagctcactcaaaggcggtaatacggttatccacagaatcaggggataacgcaggaaagaacatgtgagcaaaaggccagcaaaaggccaggaaccgtaaaaaggccgcgttgctggcgtttttccataggctccgcccccctgacgagcatcacaaaaatcgacgctcaagtcagaggtggcgaaacccgacaggactataaagataccaggcgtttccccctggaagctccctcgtgcgctctcctgttccgaccctgccgcttaccggatacctgtccgcctttctcccttcgggaagcgtggcgctttctcatagctcacgctgtaggtatctcagttcggtgtaggtcgttcgctccaagctgggctgtgtgcacgaaccccccgttcagcccgaccgctgcgccttatccggtaactatcgtcttgagtccaacccggtaagacacgacttatcgccactggcagcagccactggtaacaggattagcagagcgaggtatgtaggcggtgctacagagttcttgaagtggtggcctaactacggctacactagaagaacagtatttggtatctgcgctctgctgaagccagttaccttcggaaaaagagttggtagctcttgatccggcaaacaaaccaccgctggtagcggtggtttttttgtttgcaagcagcagattacgcgcagaaaaaaaggatctcaagaagatcctttgatcttttctacggggtctgacgctcagtggaacgaaaactcacgttaagggattttggtcatgagattatcaaaaaggatcttcacctagatccttttaaattaaaaatgaagttttaaatcaatctaaagtatatatgagtaaacttggtctgacagttaccaatgcttaatcagtgaggcacctatctcagcgatctgtctatttcgttcatccatagttgcctgactcggggggggggggcgctgaggtctgcctcgtgaagaaggtgttgctgactcataccaggcctgaatcgccccatcatccagccagaaagtgagggagccacggttgatgagagctttgttgtaggtggaccagttggtgattttgaacttttgctttgccacggaacggtctgcgttgtcgggaagatgcgtgatctgatccttcaactcagcaaaagttcgatttattcaacaaagccgccgtcccgtcaagtcagcgtaatgctctgccagtgttacaaccaattaaccaattctgattagaaaaactcatcgagcatcaaatgaaactgcaatttattcatatcaggattatcaataccatatttttgaaaaagccgtttctgtaatgaaggagaaaactcaccgaggcagttccataggatggcaagatcctggtatcggtctgcgattccgactcgtccaacatcaatacaacctattaatttcccctcgtcaaaaataaggttatcaagtgagaaatcaccatgagtgacgactgaatccggtgagaatggcaaaagcttatgcatttctttccagacttgttcaacaggccagccattacgctcgtcatcaaaatcactcgcatcaaccaaaccgttattcattcgtgattgcgcctgagcgagacgaaatacgcgatcgctgttaaaaggacaattacaaacaggaatcgaatgcaaccggcgcaggaacactgccagcgcatcaacaatattttcacctgaatcaggatattcttctaatacctggaatgctgttttcccggggatcgcagtggtgagtaaccatgcatcatcaggagtacggataaaatgcttgatggtcggaagaggcataaattccgtcagccagtttagtctgaccatctcatctgtaacatcattggcaacgctacctttgccatgtttcagaaacaactctggcgcatcgggcttcccatacaatcgatagattgtcgcacctgattgcccgacattatcgcgagcccatttatacccatataaatcagcatccatgttggaatttaatcgcggcctcgagcaagacgtttcccgttgaatatggctcataacaccccttgtattactgtttatgtaagcagacagttttattgttcatgatgatatatttttatcttgtgcaatgtaacatcagagattttgagacacaacgtggctttccccccccccccattattgaagcatttatcagggttattgtctcatgagcggatacatatttgaatgtatttagaaaaataaacaaataggggttccgcgcacatttccccgaaaagtgccacctgacgtctaagaaaccattattatcatgacattaacctataaaaataggcgtatcacgaggccctttcgtc

SEQ ID NO: 138 - DNA, 6122 bp, Artificial Sequence
  Plasmid DNA: VRC 7745
tcgcgcgtttcggtgatgacggtgaaaacctctgacacatgcagctcccggagacggtcacagcttgtctgtaagcggatgccgggagcagacaagcccgtcagggcgcgtcagcgggtgttggcgggtgtcggggctggcttaactatgcggcatcagagcagattgtactgagagtgcaccatatgcggtgtgaaataccgcacagatgcgtaaggagaaaataccgcatcagattggctattggccattgcatacgttgtatccatatcataatatgtacatttatattggctcatgtccaacattaccgccatgttgacattgattattgactagttattaatagtaatcaattacggggtcattagttcatagcccatatatggagttccgcgttacataacttacggtaaatggcccgcctggctgaccgcccaacgacccccgcccattgacgtcaataatgacgtatgttcccatagtaacgccaatagggactttccattgacgtcaatgggtggagtatttacggtaaactgcccacttggcagtacatcaagtgtatcatatgccaagtacgccccctattgacgtcaatgacggtaaatggcccgcctggcattatgcccagtacatgaccttatgggactttcctacttggcagtacatctacgtattagtcatcgctattaccatggtgatgcggttttggcagtacatcaatgggcgtggatagcggtttgactcacggggatttccaagtctccaccccattgacgtcaatgggagtttgttttggcaccaaaatcaacgggactttccaaaatgtcgtaacaactccgccccattgacgcaaatgggcggtaggcgtgtacggtgggaggtctatataagcagagctcgtttagtgaaccgtcagatcgcctggagacgccatccacgctgttttgacctccatagaagacaccgggaccgatccagcctccatcggctcgcatctctccttcacgcgcccgccgccctacctgaggccgccatccacgccggttgagtcgcgttctgccgcctcccgcctgtggtgcctcctgaactgcgtccgccgtctaggtaagtttaaagctcaggtcgagaccgggcctttgtccggcgctcccttggagcctacctagactcagccggctctccacgctttgcctgaccctgcttgctcaactctagttaacggtggagggcagtgtagtctgagcagtactcgttgctgccgcgcgcgccaccagacataatagctgacagactaacagactgttcctttccatgggtcttttctgcagtcaccgtcgtcgacacgtgtgatcagatatcgcggccgctctagagatatcgccaccatggagaaaacagtgctgctgctggccacagtgtctctggtgaagagcgaccagatctgtattggctaccacgccaacaattctacagagcaggtggacaccatcatggagaagaatgtgacagtgacacacgcccaggatattctggagagaacccacaatggcaagctgtgtgatctgaatggcgtgaagcctctgatcctgagagattgttctgtggccggatggctgctgggaaatcccatgtgtgacgagttcatcaatgtgcctgagtggagctatatcgtggagaaagccagccctgccaatgatctgtgttaccccggcaacttcaacgattacgaggagctgaaacacctgctgtccaggatcaatcacttcgagaagatccagatcatccctaagagcagctggtctaatcacgatgccagctctggagtgtctagcgcctgtccttatctgggcagaagcagcttcttcagaaacgtggtgtggctgatcaagaagaatagcgcctaccccacaatcaagcggagctacaacaacaccaaccaggaagatctgctggtgctgtggggaattcaccaccctaatgatgccgccgaacagacaaagctgtaccagaaccccaccacatatatctctgtgggcaccagcacactgaatcagagactggtgcctgagattgccacaagacctaaggtgaacggccagtctggcagaatggagttcttctggaccatcctgaagccaaacgacgccatcaacttcgagagcaacggcaatttcatcgcccctgagtacgcctataagatcgtgaagaagggcgatagcaccatcatgaagagcgagctggagtacggcaactgtaataccaagtgccagacacctatgggcgccatcaatagctctatgcccttccacaatatccaccctctgacaatcggcgagtgtcctaagtacgtgaagagcaacagactggtgctggccaccggactgagaaatacacctcagagagagaccagaggactgtttggagccatcgccggctttattgagggaggatggcagggaatggtggatggctggtatggctatcaccacagcaatgagcagggatctggatatgccgccgataaggagtctacacagaaggccattgacggcgtgacaaacaaggtgaacagcatcatcaacaagatgaacacccagtttgaagctgtgggcagagagttcaacaacctggagcggagaatcgagaacctgaacaagaagatggaggacggctttctggatgtgtggacctataatgccgaactgctcgtgctgatggagaacgagagaaccctggatttccacgacagcaacgtgaagaacctgtacgacaaagtgagactgcagctgagagataatgccaaggaactgggcaatggctgcttcgagttctaccacaagtgtgacaacgagtgtatggagagcgtgaagaacggcacctacgattaccctcagtactctgaggaagccagactgaacagagaggagatctctggcgtgaaactggagagcatgggcacataccagatcctgagcatctatagcacagtggcctcttctctggccctggccattatggtggccggactgtctctgtggatgtgtagcaatggcagcctgcagtgcagaatctgtatctgatgaacacgtgggatccagatctgctgtgccttctagttgccagccatctgttgtttgcccctcccccgtgccttccttgaccctggaaggtgccactcccactgtcctttcctaataaaatgaggaaattgcatcgcattgtctgagtaggtgtcattctattctggggggtggggtggggcaggacagcaagggggaggattgggaagacaatagcaggcatgctggggatgcggtgggctctatgggtacccaggtgctgaagaattgacccggttcctcctgggccagaaagaagcaggcacatccccttctctgtgacacaccctgtccacgcccctggttcttagttccagccccactcataggacactcatagctcaggagggctccgccttcaatcccacccgctaaagtacttggagcggtctctccctccctcatcagcccaccaaaccaaacctagcctccaagagtgggaagaaattaaagcaagataggctattaagtgcagagggagagaaaatgcctccaacatgtgaggaagtaatgagagaaatcatagaattttaaggccatgatttaaggccatcatggccttaatcttccgcttcctcgctcactgactcgctgcgctcggtcgttcggctgcggcgagcggtatcagctcactcaaaggcggtaatacggttatccacagaatcaggggataacgcaggaaagaacatgtgagcaaaaggccagcaaaaggccaggaaccgtaaaaaggccgcgttgctggcgtttttccataggctccgcccccctgacgagcatcacaaaaatcgacgctcaagtcagaggtggcgaaacccgacaggactataaagataccaggcgtttccccctggaagctccctcgtgcgctctcctgttccgaccctgccgcttaccggatacctgtccgcctttctcccttcgggaagcgtggcgctttctcatagctcacgctgtaggtatctcagttcggtgtaggtcgttcgctccaagctgggctgtgtgcacgaaccccccgttcagcccgaccgctgcgccttatccggtaactatcgtcttgagtccaacccggtaagacacgacttatcgccactggcagcagccactggtaacaggattagcagagcgaggtatgtaggcggtgctacagagttcttgaagtggtggcctaactacggctacactagaagaacagtatttggtatctgcgctctgctgaagccagttaccttcggaaaaagagttggtagctcttgatccggcaaacaaaccaccgctggtagcggtggtttttttgtttgcaagcagcagattacgcgcagaaaaaaaggatctcaagaagatcctttgatcttttctacggggtctgacgctcagtggaacgaaaactcacgttaagggattttggtcatgagattatcaaaaaggatcttcacctagatccttttaaattaaaaatgaagttttaaatcaatctaaagtatatatgagtaaacttggtctgacagttaccaatgcttaatcagtgaggcacctatctcagcgatctgtctatttcgttcatccatagttgcctgactcggggggggggggcgctgaggtctgcctcgtgaagaaggtgttgctgactcataccaggcctgaatcgccccatcatccagccagaaagtgagggagccacggttgatgagagctttgttgtaggtggaccagttggtgattttgaacttttgctttgccacggaacggtctgcgttgtcgggaagatgcgtgatctgatccttcaactcagcaaaagttcgatttattcaacaaagccgccgtcccgtcaagtcagcgtaatgctctgccagtgttacaaccaattaaccaattctgattagaaaaactcatcgagcatcaaatgaaactgcaatttattcatatcaggattatcaataccatatttttgaaaaagccgtttctgtaatgaaggagaaaactcaccgaggcagttccataggatggcaagatcctggtatcggtctgcgattccgactcgtccaacatcaatacaacctattaatttcccctcgtcaaaaataaggttatcaagtgagaaatcaccatgagtgacgactgaatccggtgagaatggcaaaagcttatgcatttctttccagacttgttcaacaggccagccattacgctcgtcatcaaaatcactcgcatcaaccaaaccgttattcattcgtgattgcgcctgagcgagacgaaatacgcgatcgctgttaaaaggacaattacaaacaggaatcgaatgcaaccggcgcaggaacactgccagcgcatcaacaatattttcacctgaatcaggatattcttctaatacctggaatgctgttttcccggggatcgcagtggtgagtaaccatgcatcatcaggagtacggataaaatgcttgatggtcggaagaggcataaattccgtcagccagtttagtctgaccatctcatctgtaacatcattggcaacgctacctttgccatgtttcagaaacaactctggcgcatcgggcttcccatacaatcgatagattgtcgcacctgattgcccgacattatcgcgagcccatttatacccatataaatcagcatccatgttggaatttaatcgcggcctcgagcaagacgtttcccgttgaatatggctcataacaccccttgtattactgtttatgtaagcagacagttttattgttcatgatgatatatttttatcttgtgcaatgtaacatcagagattttgagacacaacgtggctttccccccccccccattattgaagcatttatcagggttattgtctcatgagcggatacatatttgaatgtatttagaaaaataaacaaataggggttccgcgcacatttccccgaaaagtgccacctgacgtctaagaaaccattattatcatgacattaacctataaaaataggcgtatcacgaggccctttcgtc

SEQ ID NO: 139 - DNA, 6149 bp, Artificial Sequence
  Plasmid DNA: VRC 7746
tcgcgcgtttcggtgatgacggtgaaaacctctgacacatgcagctcccggagacggtcacagcttgtctgtaagcggatgccgggagcagacaagcccgtcagggcgcgtcagcgggtgttggcgggtgtcggggctggcttaactatgcggcatcagagcagattgtactgagagtgcaccatatgcggtgtgaaataccgcacagatgcgtaaggagaaaataccgcatcagattggctattggccattgcatacgttgtatccatatcataatatgtacatttatattggctcatgtccaacattaccgccatgttgacattgattattgactagttattaatagtaatcaattacggggtcattagttcatagcccatatatggagttccgcgttacataacttacggtaaatggcccgcctggctgaccgcccaacgacccccgcccattgacgtcaataatgacgtatgttcccatagtaacgccaatagggactttccattgacgtcaatgggtggagtatttacggtaaactgcccacttggcagtacatcaagtgtatcatatgccaagtacgccccctattgacgtcaatgacggtaaatggcccgcctggcattatgcccagtacatgaccttatgggactttcctacttggcagtacatctacgtattagtcatcgctattaccatggtgatgcggttttggcagtacatcaatgggcgtggatagcggtttgactcacggggatttccaagtctccaccccattgacgtcaatgggagtttgttttggcaccaaaatcaacgggactttccaaaatgtcgtaacaactccgccccattgacgcaaatgggcggtaggcgtgtacggtgggaggtctatataagcagagctcgtttagtgaaccgtcagatcgcctggagacgccatccacgctgttttgacctccatagaagacaccgggaccgatccagcctccatcggctcgcatctctccttcacgcgcccgccgccctacctgaggccgccatccacgccggttgagtcgcgttctgccgcctcccgcctgtggtgcctcctgaactgcgtccgccgtctaggtaagtttaaagctcaggtcgagaccgggcctttgtccggcgctcccttggagcctacctagactcagccggctctccacgctttgcctgaccctgcttgctcaactctagttaacggtggagggcagtgtagtctgagcagtactcgttgctgccgcgcgcgccaccagacataatagctgacagactaacagactgttcctttccatgggtcttttctgcagtcaccgtcgtcgacacgtgtgatcagatatcgcggccgctctagagatatcgccaccatggagaaaacagtgctgctgctggccacagtgtctctggtgaagagcgaccagatctgtattggctaccacgccaacaattctacagagcaggtggacaccatcatggagaagaatgtgacagtgacacacgcccaggatattctggagagaacccacaatggcaagctgtgtgatctgaatggcgtgaagcctctgatcctgagagattgttctgtggccggatggctgctgggaaatcccatgtgtgacgagttcatcaatgtgcctgagtggagctatatcgtggagaaagccagccctgccaatgatctgtgttaccccggcaacttcaacgattacgaggagctgaaacacctgctgtccaggatcaatcacttcgagaagatccagatcatccctaagagcagctggtctaatcacgatgccagctctggagtgtctagcgcctgtccttatctgggcagaagcagcttcttcagaaacgtggtgtggctgatcaagaagaatagcgcctaccccacaatcaagcggagctacaacaacaccaaccaggaagatctgctggtgctgtggggaattcaccaccctaatgatgccgccgaacagacaaagctgtaccagaaccccaccacatatatctctgtgggcaccagcacactgaatcagagactggtgcctgagattgccacaagacctaaggtgaacggccagtctggcagaatggagttcttctggaccatcctgaagccaaacgacgccatcaacttcgagagcaacggcaatttcatcgcccctgagtacgcctataagatcgtgaagaagggcgatagcaccatcatgaagagcgagctggagtacggcaactgtaataccaagtgccagacacctatgggcgccatcaatagctctatgcccttccacaatatccaccctctgacaatcggcgagtgtcctaagtacgtgaagagcaacagactggtgctggccaccggactgagaaatacacctcagagagagaccagaggactgtttggagccatcgccggctttattgagggaggatggcagggaatggtggatggctggtatggctatcaccacagcaatgagcagggatctggatatgccgccgataaggagtctacacagaaggccattgacggcgtgacaaacaaggtgaacagcatcatcaacaagatgaacacccagtttgaagctgtgggcagagagttcaacaacctggagcggagaatcgagaacctgaacaagaagatggaggacggctttctggatgtgtggacctataatgccgaactgctcgtgctgatggagaacgagagaaccctggatttccacgacagcaacgtgaagaacctgtacgacaaagtgagactgcagctgagagataatgccaaggaactgggcaatggctgcttcgagttctaccacaagtgtgacaacgagtgtatggagagcgtgaagaacggcacctacgattaccctcagtactctgaggaagccagactgaacagagaggagatctctggcgtgaaactggagagcatgggcacataccagatcagaagcctggtgcctagaggatctcctggcagcggatatattcctgaggcccctagagatggacaggcctatgtgagaaaggatggcgaatgggtgctgctgtctacatttctgggacaccaccatcaccaccattgatgaacacgtgggatccagatctgctgtgccttctagttgccagccatctgttgtttgcccctcccccgtgccttccttgaccctggaaggtgccactcccactgtcctttcctaataaaatgaggaaattgcatcgcattgtctgagtaggtgtcattctattctggggggtggggtggggcaggacagcaagggggaggattgggaagacaatagcaggcatgctggggatgcggtgggctctatgggtacccaggtgctgaagaattgacccggttcctcctgggccagaaagaagcaggcacatccccttctctgtgacacaccctgtccacgcccctggttcttagttccagccccactcataggacactcatagctcaggagggctccgccttcaatcccacccgctaaagtacttggagcggtctctccctccctcatcagcccaccaaaccaaacctagcctccaagagtgggaagaaattaaagcaagataggctattaagtgcagagggagagaaaatgcctccaacatgtgaggaagtaatgagagaaatcatagaattttaaggccatgatttaaggccatcatggccttaatcttccgcttcctcgctcactgactcgctgcgctcggtcgttcggctgcggcgagcggtatcagctcactcaaaggcggtaatacggttatccacagaatcaggggataacgcaggaaagaacatgtgagcaaaaggccagcaaaaggccaggaaccgtaaaaaggccgcgttgctggcgtttttccataggctccgcccccctgacgagcatcacaaaaatcgacgctcaagtcagaggtggcgaaacccgacaggactataaagataccaggcgtttccccctggaagctccctcgtgcgctctcctgttccgaccctgccgcttaccggatacctgtccgcctttctcccttcgggaagcgtggcgctttctcatagctcacgctgtaggtatctcagttcggtgtaggtcgttcgctccaagctgggctgtgtgcacgaaccccccgttcagcccgaccgctgcgccttatccggtaactatcgtcttgagtccaacccggtaagacacgacttatcgccactggcagcagccactggtaacaggattagcagagcgaggtatgtaggcggtgctacagagttcttgaagtggtggcctaactacggctacactagaagaacagtatttggtatctgcgctctgctgaagccagttaccttcggaaaaagagttggtagctcttgatccggcaaacaaaccaccgctggtagcggtggtttttttgtttgcaagcagcagattacgcgcagaaaaaaaggatctcaagaagatcctttgatcttttctacggggtctgacgctcagtggaacgaaaactcacgttaagggattttggtcatgagattatcaaaaaggatcttcacctagatccttttaaattaaaaatgaagttttaaatcaatctaaagtatatatgagtaaacttggtctgacagttaccaatgcttaatcagtgaggcacctatctcagcgatctgtctatttcgttcatccatagttgcctgactcggggggggggggcgctgaggtctgcctcgtgaagaaggtgttgctgactcataccaggcctgaatcgccccatcatccagccagaaagtgagggagccacggttgatgagagctttgttgtaggtggaccagttggtgattttgaacttttgctttgccacggaacggtctgcgttgtcgggaagatgcgtgatctgatccttcaactcagcaaaagttcgatttattcaacaaagccgccgtcccgtcaagtcagcgtaatgctctgccagtgttacaaccaattaaccaattctgattagaaaaactcatcgagcatcaaatgaaactgcaatttattcatatcaggattatcaataccatatttttgaaaaagccgtttctgtaatgaaggagaaaactcaccgaggcagttccataggatggcaagatcctggtatcggtctgcgattccgactcgtccaacatcaatacaacctattaatttcccctcgtcaaaaataaggttatcaagtgagaaatcaccatgagtgacgactgaatccggtgagaatggcaaaagcttatgcatttctttccagacttgttcaacaggccagccattacgctcgtcatcaaaatcactcgcatcaaccaaaccgttattcattcgtgattgcgcctgagcgagacgaaatacgcgatcgctgttaaaaggacaattacaaacaggaatcgaatgcaaccggcgcaggaacactgccagcgcatcaacaatattttcacctgaatcaggatattcttctaatacctggaatgctgttttcccggggatcgcagtggtgagtaaccatgcatcatcaggagtacggataaaatgcttgatggtcggaagaggcataaattccgtcagccagtttagtctgaccatctcatctgtaacatcattggcaacgctacctttgccatgtttcagaaacaactctggcgcatcgggcttcccatacaatcgatagattgtcgcacctgattgcccgacattatcgcgagcccatttatacccatataaatcagcatccatgttggaatttaatcgcggcctcgagcaagacgtttcccgttgaatatggctcataacaccccttgtattactgtttatgtaagcagacagttttattgttcatgatgatatatttttatcttgtgcaatgtaacatcagagattttgagacacaacgtggctttccccccccccccattattgaagcatttatcagggttattgtctcatgagcggatacatatttgaatgtatttagaaaaataaacaaataggggttccgcgcacatttccccgaaaagtgccacctgacgtctaagaaaccattattatcatgacattaacctataaaaataggcgtatcacgaggccctttcgtc

SEQ ID NO: 140 - DNA, 6134 bp, Artificial Sequence
  Plasmid DNA: VRC 7747
tcgcgcgtttcggtgatgacggtgaaaacctctgacacatgcagctcccggagacggtcacagcttgtctgtaagcggatgccgggagcagacaagcccgtcagggcgcgtcagcgggtgttggcgggtgtcggggctggcttaactatgcggcatcagagcagattgtactgagagtgcaccatatgcggtgtgaaataccgcacagatgcgtaaggagaaaataccgcatcagattggctattggccattgcatacgttgtatccatatcataatatgtacatttatattggctcatgtccaacattaccgccatgttgacattgattattgactagttattaatagtaatcaattacggggtcattagttcatagcccatatatggagttccgcgttacataacttacggtaaatggcccgcctggctgaccgcccaacgacccccgcccattgacgtcaataatgacgtatgttcccatagtaacgccaatagggactttccattgacgtcaatgggtggagtatttacggtaaactgcccacttggcagtacatcaagtgtatcatatgccaagtacgccccctattgacgtcaatgacggtaaatggcccgcctggcattatgcccagtacatgaccttatgggactttcctacttggcagtacatctacgtattagtcatcgctattaccatggtgatgcggttttggcagtacatcaatgggcgtggatagcggtttgactcacggggatttccaagtctccaccccattgacgtcaatgggagtttgttttggcaccaaaatcaacgggactttccaaaatgtcgtaacaactccgccccattgacgcaaatgggcggtaggcgtgtacggtgggaggtctatataagcagagctcgtttagtgaaccgtcagatcgcctggagacgccatccacgctgttttgacctccatagaagacaccgggaccgatccagcctccatcggctcgcatctctccttcacgcgcccgccgccctacctgaggccgccatccacgccggttgagtcgcgttctgccgcctcccgcctgtggtgcctcctgaactgcgtccgccgtctaggtaagtttaaagctcaggtcgagaccgggcctttgtccggcgctcccttggagcctacctagactcagccggctctccacgctttgcctgaccctgcttgctcaactctagttaacggtggagggcagtgtagtctgagcagtactcgttgctgccgcgcgcgccaccagacataatagctgacagactaacagactgttcctttccatgggtcttttctgcagtcaccgtcgtcgacacgtgtgatcagatatcgcggccgctctagagatatcgccaccatggagaagattgtgctgctgctggccacagtgtctctggtgaagagcgaccagatctgtattggctaccacgccaacaattctacagagcaggtggacaccatcatggagaaaaacgtgacagtgacacacgcccaggatattctggagagaacccacaatggcaagctgtgtgatctgaatggcgtgaagcctctgatcctgagagattgttctgtggccggatggctgctgggaaatcccatgtgtgacgagttcatcaatgtgcctgagtggagctatatcgtggagaaagccagccctgccaatgatctgtgttaccccggcaacttcaacgattacgaggagctgaaacacctgctgtccagaatcagccacttcgagaagatccagatcatccctaagagcagctggtctaatcacgatgccagctctggagtgtctagcgcctgtccttatctgggcaagagcagcttcttcagaaatgtggtgtggctgatcaagaagaacagcacctaccccacaatcaagcggagctacaacaacaccaaccaggaagatctgctggtgctgtggggaattcaccaccctaatgatgccgccgaacagacaaagctgtaccagaaccccaccacatatatctctgtgggcaccagcacactgaatcagagactggtgcctgagattgccacaagacctaaggtgaacggccagtctggcagaatcgagttcttctggaccatcctgaagccaaacgacgccatcaacttcgagagcaacggcaatttcatcgcccctgagtacgcctataagatcgtgaagaagggcgatagcaccatcatgaagagcgagctggagtacggcaactgtaataccaagtgccagacacctatgggcgccatcaatagctctatgcccttccacaatatccaccctctgacaatcggcgagtgtcctaagtacgtgaagagcaacagactggtgctggccaccggactgagaaatgcccctcagagagagcggagacggaagaaaagaggactgtttggagccatcgccggctttattgagggaggatggcagggaatggtggatggctggtatggctatcaccacagcaatgagcagggatctggatatgccgccgatcaggagtctacacagaaagccatcgacggcgtgacaaataaggtgaacagcatcatcaacaagatgaacacccagtttgaagctgtgggcagagagttcaacaacctggagcggagaatcgagaacctgaacaagaagatggaggacggctttctggatgtgtggacctataatgccgaactgctcgtgctgatggagaacgagagaaccctggatttccacgacagcaacgtgaagaacctgtacgacaaagtgagactgcagctgagagataatgccaaggaactgggcaatggctgcttcgagttctaccacaagtgtgacaacgagtgtatggagagcgtgaagaatggcacctacgactaccctcagtattctgaggaggccagactgaatagagaggagatcagcggcgtgaaactggaaagcatgggcacctaccagatcctgagcctgtattctacagtggcctcttctctggccctggccattatggtggccggactgtctctgtggatgtgtagcaatggcagcctgcagtgcagaatctgtatctgatgaacacgtgggatccagatctgctgtgccttctagttgccagccatctgttgtttgcccctcccccgtgccttccttgaccctggaaggtgccactcccactgtcctttcctaataaaatgaggaaattgcatcgcattgtctgagtaggtgtcattctattctggggggtggggtggggcaggacagcaagggggaggattgggaagacaatagcaggcatgctggggatgcggtgggctctatgggtacccaggtgctgaagaattgacccggttcctcctgggccagaaagaagcaggcacatccccttctctgtgacacaccctgtccacgcccctggttcttagttccagccccactcataggacactcatagctcaggagggctccgccttcaatcccacccgctaaagtacttggagcggtctctccctccctcatcagcccaccaaaccaaacctagcctccaagagtgggaagaaattaaagcaagataggctattaagtgcagagggagagaaaatgcctccaacatgtgaggaagtaatgagagaaatcatagaattttaaggccatgatttaaggccatcatggccttaatcttccgcttcctcgctcactgactcgctgcgctcggtcgttcggctgcggcgagcggtatcagctcactcaaaggcggtaatacggttatccacagaatcaggggataacgcaggaaagaacatgtgagcaaaaggccagcaaaaggccaggaaccgtaaaaaggccgcgttgctggcgtttttccataggctccgcccccctgacgagcatcacaaaaatcgacgctcaagtcagaggtggcgaaacccgacaggactataaagataccaggcgtttccccctggaagctccctcgtgcgctctcctgttccgaccctgccgcttaccggatacctgtccgcctttctcccttcgggaagcgtggcgctttctcatagctcacgctgtaggtatctcagttcggtgtaggtcgttcgctccaagctgggctgtgtgcacgaaccccccgttcagcccgaccgctgcgccttatccggtaactatcgtcttgagtccaacccggtaagacacgacttatcgccactggcagcagccactggtaacaggattagcagagcgaggtatgtaggcggtgctacagagttcttgaagtggtggcctaactacggctacactagaagaacagtatttggtatctgcgctctgctgaagccagttaccttcggaaaaagagttggtagctcttgatccggcaaacaaaccaccgctggtagcggtggtttttttgtttgcaagcagcagattacgcgcagaaaaaaaggatctcaagaagatcctttgatcttttctacggggtctgacgctcagtggaacgaaaactcacgttaagggattttggtcatgagattatcaaaaaggatcttcacctagatccttttaaattaaaaatgaagttttaaatcaatctaaagtatatatgagtaaacttggtctgacagttaccaatgcttaatcagtgaggcacctatctcagcgatctgtctatttcgttcatccatagttgcctgactcggggggggggggcgctgaggtctgcctcgtgaagaaggtgttgctgactcataccaggcctgaatcgccccatcatccagccagaaagtgagggagccacggttgatgagagctttgttgtaggtggaccagttggtgattttgaacttttgctttgccacggaacggtctgcgttgtcgggaagatgcgtgatctgatccttcaactcagcaaaagttcgatttattcaacaaagccgccgtcccgtcaagtcagcgtaatgctctgccagtgttacaaccaattaaccaattctgattagaaaaactcatcgagcatcaaatgaaactgcaatttattcatatcaggattatcaataccatatttttgaaaaagccgtttctgtaatgaaggagaaaactcaccgaggcagttccataggatggcaagatcctggtatcggtctgcgattccgactcgtccaacatcaatacaacctattaatttcccctcgtcaaaaataaggttatcaagtgagaaatcaccatgagtgacgactgaatccggtgagaatggcaaaagcttatgcatttctttccagacttgttcaacaggccagccattacgctcgtcatcaaaatcactcgcatcaaccaaaccgttattcattcgtgattgcgcctgagcgagacgaaatacgcgatcgctgttaaaaggacaattacaaacaggaatcgaatgcaaccggcgcaggaacactgccagcgcatcaacaatattttcacctgaatcaggatattcttctaatacctggaatgctgttttcccggggatcgcagtggtgagtaaccatgcatcatcaggagtacggataaaatgcttgatggtcggaagaggcataaattccgtcagccagtttagtctgaccatctcatctgtaacatcattggcaacgctacctttgccatgtttcagaaacaactctggcgcatcgggcttcccatacaatcgatagattgtcgcacctgattgcccgacattatcgcgagcccatttatacccatataaatcagcatccatgttggaatttaatcgcggcctcgagcaagacgtttcccgttgaatatggctcataacaccccttgtattactgtttatgtaagcagacagttttattgttcatgatgatatatttttatcttgtgcaatgtaacatcagagattttgagacacaacgtggctttccccccccccccattattgaagcatttatcagggttattgtctcatgagcggatacatatttgaatgtatttagaaaaataaacaaataggggttccgcgcacatttccccgaaaagtgccacctgacgtctaagaaaccattattatcatgacattaacctataaaaataggcgtatcacgaggccctttcgtc

SEQ ID NO: 141 - DNA, 6122 bp, Artificial Sequence
  Plasmid DNA: VRC 7748
tcgcgcgtttcggtgatgacggtgaaaacctctgacacatgcagctcccggagacggtcacagcttgtctgtaagcggatgccgggagcagacaagcccgtcagggcgcgtcagcgggtgttggcgggtgtcggggctggcttaactatgcggcatcagagcagattgtactgagagtgcaccatatgcggtgtgaaataccgcacagatgcgtaaggagaaaataccgcatcagattggctattggccattgcatacgttgtatccatatcataatatgtacatttatattggctcatgtccaacattaccgccatgttgacattgattattgactagttattaatagtaatcaattacggggtcattagttcatagcccatatatggagttccgcgttacataacttacggtaaatggcccgcctggctgaccgcccaacgacccccgcccattgacgtcaataatgacgtatgttcccatagtaacgccaatagggactttccattgacgtcaatgggtggagtatttacggtaaactgcccacttggcagtacatcaagtgtatcatatgccaagtacgccccctattgacgtcaatgacggtaaatggcccgcctggcattatgcccagtacatgaccttatgggactttcctacttggcagtacatctacgtattagtcatcgctattaccatggtgatgcggttttggcagtacatcaatgggcgtggatagcggtttgactcacggggatttccaagtctccaccccattgacgtcaatgggagtttgttttggcaccaaaatcaacgggactttccaaaatgtcgtaacaactccgccccattgacgcaaatgggcggtaggcgtgtacggtgggaggtctatataagcagagctcgtttagtgaaccgtcagatcgcctggagacgccatccacgctgttttgacctccatagaagacaccgggaccgatccagcctccatcggctcgcatctctccttcacgcgcccgccgccctacctgaggccgccatccacgccggttgagtcgcgttctgccgcctcccgcctgtggtgcctcctgaactgcgtccgccgtctaggtaagtttaaagctcaggtcgagaccgggcctttgtccggcgctcccttggagcctacctagactcagccggctctccacgctttgcctgaccctgcttgctcaactctagttaacggtggagggcagtgtagtctgagcagtactcgttgctgccgcgcgcgccaccagacataatagctgacagactaacagactgttcctttccatgggtcttttctgcagtcaccgtcgtcgacacgtgtgatcagatatcgcggccgctctagagatatcgccaccatggagaagattgtgctgctgctggccacagtgtctctggtgaagagcgaccagatctgtattggctaccacgccaacaattctacagagcaggtggacaccatcatggagaaaaacgtgacagtgacacacgcccaggatattctggagagaacccacaatggcaagctgtgtgatctgaatggcgtgaagcctctgatcctgagagattgttctgtggccggatggctgctgggaaatcccatgtgtgacgagttcatcaatgtgcctgagtggagctatatcgtggagaaagccagccctgccaatgatctgtgttaccccggcaacttcaacgattacgaggagctgaaacacctgctgtccagaatcagccacttcgagaagatccagatcatccctaagagcagctggtctaatcacgatgccagctctggagtgtctagcgcctgtccttatctgggcaagagcagcttcttcagaaatgtggtgtggctgatcaagaagaacagcacctaccccacaatcaagcggagctacaacaacaccaaccaggaagatctgctggtgctgtggggaattcaccaccctaatgatgccgccgaacagacaaagctgtaccagaaccccaccacatatatctctgtgggcaccagcacactgaatcagagactggtgcctgagattgccacaagacctaaggtgaacggccagtctggcagaatcgagttcttctggaccatcctgaagccaaacgacgccatcaacttcgagagcaacggcaatttcatcgcccctgagtacgcctataagatcgtgaagaagggcgatagcaccatcatgaagagcgagctggagtacggcaactgtaataccaagtgccagacacctatgggcgccatcaatagctctatgcccttccacaatatccaccctctgacaatcggcgagtgtcctaagtacgtgaagagcaacagactggtgctggccaccggactgagaaatgcccctcagagagagacaagaggactgtttggagccatcgccggctttattgagggaggatggcagggaatggtggatggctggtatggctatcaccacagcaatgagcagggatctggatatgccgccgatcaggagtctacacagaaagccatcgacggcgtgacaaataaggtgaacagcatcatcaacaagatgaacacccagtttgaagctgtgggcagagagttcaacaacctggagcggagaatcgagaacctgaacaagaagatggaggacggctttctggatgtgtggacctataatgccgaactgctcgtgctgatggagaacgagagaaccctggatttccacgacagcaacgtgaagaacctgtacgacaaagtgagactgcagctgagagataatgccaaggaactgggcaatggctgcttcgagttctaccacaagtgtgacaacgagtgtatggagagcgtgaagaatggcacctacgactaccctcagtattctgaggaggccagactgaatagagaggagatcagcggcgtgaaactggaaagcatgggcacctaccagatcctgagcctgtattctacagtggcctcttctctggccctggccattatggtggccggactgtctctgtggatgtgtagcaatggcagcctgcagtgcagaatctgtatctgatgaacacgtgggatccagatctgctgtgccttctagttgccagccatctgttgtttgcccctcccccgtgccttccttgaccctggaaggtgccactcccactgtcctttcctaataaaatgaggaaattgcatcgcattgtctgagtaggtgtcattctattctggggggtggggtggggcaggacagcaagggggaggattgggaagacaatagcaggcatgctggggatgcggtgggctctatgggtacccaggtgctgaagaattgacccggttcctcctgggccagaaagaagcaggcacatccccttctctgtgacacaccctgtccacgcccctggttcttagttccagccccactcataggacactcatagctcaggagggctccgccttcaatcccacccgctaaagtacttggagcggtctctccctccctcatcagcccaccaaaccaaacctagcctccaagagtgggaagaaattaaagcaagataggctattaagtgcagagggagagaaaatgcctccaacatgtgaggaagtaatgagagaaatcatagaattttaaggccatgatttaaggccatcatggccttaatcttccgcttcctcgctcactgactcgctgcgctcggtcgttcggctgcggcgagcggtatcagctcactcaaaggcggtaatacggttatccacagaatcaggggataacgcaggaaagaacatgtgagcaaaaggccagcaaaaggccaggaaccgtaaaaaggccgcgttgctggcgtttttccataggctccgcccccctgacgagcatcacaaaaatcgacgctcaagtcagaggtggcgaaacccgacaggactataaagataccaggcgtttccccctggaagctccctcgtgcgctctcctgttccgaccctgccgcttaccggatacctgtccgcctttctcccttcgggaagcgtggcgctttctcatagctcacgctgtaggtatctcagttcggtgtaggtcgttcgctccaagctgggctgtgtgcacgaaccccccgttcagcccgaccgctgcgccttatccggtaactatcgtcttgagtccaacccggtaagacacgacttatcgccactggcagcagccactggtaacaggattagcagagcgaggtatgtaggcggtgctacagagttcttgaagtggtggcctaactacggctacactagaagaacagtatttggtatctgcgctctgctgaagccagttaccttcggaaaaagagttggtagctcttgatccggcaaacaaaccaccgctggtagcggtggtttttttgtttgcaagcagcagattacgcgcagaaaaaaaggatctcaagaagatcctttgatcttttctacggggtctgacgctcagtggaacgaaaactcacgttaagggattttggtcatgagattatcaaaaaggatcttcacctagatccttttaaattaaaaatgaagttttaaatcaatctaaagtatatatgagtaaacttggtctgacagttaccaatgcttaatcagtgaggcacctatctcagcgatctgtctatttcgttcatccatagttgcctgactcggggggggggggcgctgaggtctgcctcgtgaagaaggtgttgctgactcataccaggcctgaatcgccccatcatccagccagaaagtgagggagccacggttgatgagagctttgttgtaggtggaccagttggtgattttgaacttttgctttgccacggaacggtctgcgttgtcgggaagatgcgtgatctgatccttcaactcagcaaaagttcgatttattcaacaaagccgccgtcccgtcaagtcagcgtaatgctctgccagtgttacaaccaattaaccaattctgattagaaaaactcatcgagcatcaaatgaaactgcaatttattcatatcaggattatcaataccatatttttgaaaaagccgtttctgtaatgaaggagaaaactcaccgaggcagttccataggatggcaagatcctggtatcggtctgcgattccgactcgtccaacatcaatacaacctattaatttcccctcgtcaaaaataaggttatcaagtgagaaatcaccatgagtgacgactgaatccggtgagaatggcaaaagcttatgcatttctttccagacttgttcaacaggccagccattacgctcgtcatcaaaatcactcgcatcaaccaaaccgttattcattcgtgattgcgcctgagcgagacgaaatacgcgatcgctgttaaaaggacaattacaaacaggaatcgaatgcaaccggcgcaggaacactgccagcgcatcaacaatattttcacctgaatcaggatattcttctaatacctggaatgctgttttcccggggatcgcagtggtgagtaaccatgcatcatcaggagtacggataaaatgcttgatggtcggaagaggcataaattccgtcagccagtttagtctgaccatctcatctgtaacatcattggcaacgctacctttgccatgtttcagaaacaactctggcgcatcgggcttcccatacaatcgatagattgtcgcacctgattgcccgacattatcgcgagcccatttatacccatataaatcagcatccatgttggaatttaatcgcggcctcgagcaagacgtttcccgttgaatatggctcataacaccccttgtattactgtttatgtaagcagacagttttattgttcatgatgatatatttttatcttgtgcaatgtaacatcagagattttgagacacaacgtggctttccccccccccccattattgaagcatttatcagggttattgtctcatgagcggatacatatttgaatgtatttagaaaaataaacaaataggggttccgcgcacatttccccgaaaagtgccacctgacgtctaagaaaccattattatcatgacattaacctataaaaataggcgtatcacgaggccctttcgtc

SEQ ID NO: 142 - DNA, 6149 bp, Artificial Sequence
  Plasmid DNA: VRC 7749
tcgcgcgtttcggtgatgacggtgaaaacctctgacacatgcagctcccggagacggtcacagcttgtctgtaagcggatgccgggagcagacaagcccgtcagggcgcgtcagcgggtgttggcgggtgtcggggctggcttaactatgcggcatcagagcagattgtactgagagtgcaccatatgcggtgtgaaataccgcacagatgcgtaaggagaaaataccgcatcagattggctattggccattgcatacgttgtatccatatcataatatgtacatttatattggctcatgtccaacattaccgccatgttgacattgattattgactagttattaatagtaatcaattacggggtcattagttcatagcccatatatggagttccgcgttacataacttacggtaaatggcccgcctggctgaccgcccaacgacccccgcccattgacgtcaataatgacgtatgttcccatagtaacgccaatagggactttccattgacgtcaatgggtggagtatttacggtaaactgcccacttggcagtacatcaagtgtatcatatgccaagtacgccccctattgacgtcaatgacggtaaatggcccgcctggcattatgcccagtacatgaccttatgggactttcctacttggcagtacatctacgtattagtcatcgctattaccatggtgatgcggttttggcagtacatcaatgggcgtggatagcggtttgactcacggggatttccaagtctccaccccattgacgtcaatgggagtttgttttggcaccaaaatcaacgggactttccaaaatgtcgtaacaactccgccccattgacgcaaatgggcggtaggcgtgtacggtgggaggtctatataagcagagctcgtttagtgaaccgtcagatcgcctggagacgccatccacgctgttttgacctccatagaagacaccgggaccgatccagcctccatcggctcgcatctctccttcacgcgcccgccgccctacctgaggccgccatccacgccggttgagtcgcgttctgccgcctcccgcctgtggtgcctcctgaactgcgtccgccgtctaggtaagtttaaagctcaggtcgagaccgggcctttgtccggcgctcccttggagcctacctagactcagccggctctccacgctttgcctgaccctgcttgctcaactctagttaacggtggagggcagtgtagtctgagcagtactcgttgctgccgcgcgcgccaccagacataatagctgacagactaacagactgttcctttccatgggtcttttctgcagtcaccgtcgtcgacacgtgtgatcagatatcgcggccgctctagagatatcgccaccatggagaagattgtgctgctgctggccacagtgtctctggtgaagagcgaccagatctgtattggctaccacgccaacaattctacagagcaggtggacaccatcatggagaaaaacgtgacagtgacacacgcccaggatattctggagagaacccacaatggcaagctgtgtgatctgaatggcgtgaagcctctgatcctgagagattgttctgtggccggatggctgctgggaaatcccatgtgtgacgagttcatcaatgtgcctgagtggagctatatcgtggagaaagccagccctgccaatgatctgtgttaccccggcaacttcaacgattacgaggagctgaaacacctgctgtccagaatcagccacttcgagaagatccagatcatccctaagagcagctggtctaatcacgatgccagctctggagtgtctagcgcctgtccttatctgggcaagagcagcttcttcagaaatgtggtgtggctgatcaagaagaacagcacctaccccacaatcaagcggagctacaacaacaccaaccaggaagatctgctggtgctgtggggaattcaccaccctaatgatgccgccgaacagacaaagctgtaccagaaccccaccacatatatctctgtgggcaccagcacactgaatcagagactggtgcctgagattgccacaagacctaaggtgaacggccagtctggcagaatcgagttcttctggaccatcctgaagccaaacgacgccatcaacttcgagagcaacggcaatttcatcgcccctgagtacgcctataagatcgtgaagaagggcgatagcaccatcatgaagagcgagctggagtacggcaactgtaataccaagtgccagacacctatgggcgccatcaatagctctatgcccttccacaatatccaccctctgacaatcggcgagtgtcctaagtacgtgaagagcaacagactggtgctggccaccggactgagaaatgcccctcagagagagacaagaggactgtttggagccatcgccggctttattgagggaggatggcagggaatggtggatggctggtatggctatcaccacagcaatgagcagggatctggatatgccgccgatcaggagtctacacagaaagccatcgacggcgtgacaaataaggtgaacagcatcatcaacaagatgaacacccagtttgaagctgtgggcagagagttcaacaacctggagcggagaatcgagaacctgaacaagaagatggaggacggctttctggatgtgtggacctataatgccgaactgctcgtgctgatggagaacgagagaaccctggatttccacgacagcaacgtgaagaacctgtacgacaaagtgagactgcagctgagagataatgccaaggaactgggcaatggctgcttcgagttctaccacaagtgtgacaacgagtgtatggagagcgtgaagaatggcacctacgactaccctcagtattctgaggaggccagactgaatagagaggagatcagcggcgtgaaactggaaagcatgggcacctaccagatcagaagcctggtgcctagaggatctcctggcagcggatatattcctgaggcccctagagatggacaggcctatgtgagaaaggatggcgaatgggtgctgctgtctacatttctgggacaccaccatcaccaccattgatgaacacgtgggatccagatctgctgtgccttctagttgccagccatctgttgtttgcccctcccccgtgccttccttgaccctggaaggtgccactcccactgtcctttcctaataaaatgaggaaattgcatcgcattgtctgagtaggtgtcattctattctggggggtggggtggggcaggacagcaagggggaggattgggaagacaatagcaggcatgctggggatgcggtgggctctatgggtacccaggtgctgaagaattgacccggttcctcctgggccagaaagaagcaggcacatccccttctctgtgacacaccctgtccacgcccctggttcttagttccagccccactcataggacactcatagctcaggagggctccgccttcaatcccacccgctaaagtacttggagcggtctctccctccctcatcagcccaccaaaccaaacctagcctccaagagtgggaagaaattaaagcaagataggctattaagtgcagagggagagaaaatgcctccaacatgtgaggaagtaatgagagaaatcatagaattttaaggccatgatttaaggccatcatggccttaatcttccgcttcctcgctcactgactcgctgcgctcggtcgttcggctgcggcgagcggtatcagctcactcaaaggcggtaatacggttatccacagaatcaggggataacgcaggaaagaacatgtgagcaaaaggccagcaaaaggccaggaaccgtaaaaaggccgcgttgctggcgtttttccataggctccgcccccctgacgagcatcacaaaaatcgacgctcaagtcagaggtggcgaaacccgacaggactataaagataccaggcgtttccccctggaagctccctcgtgcgctctcctgttccgaccctgccgcttaccggatacctgtccgcctttctcccttcgggaagcgtggcgctttctcatagctcacgctgtaggtatctcagttcggtgtaggtcgttcgctccaagctgggctgtgtgcacgaaccccccgttcagcccgaccgctgcgccttatccggtaactatcgtcttgagtccaacccggtaagacacgacttatcgccactggcagcagccactggtaacaggattagcagagcgaggtatgtaggcggtgctacagagttcttgaagtggtggcctaactacggctacactagaagaacagtatttggtatctgcgctctgctgaagccagttaccttcggaaaaagagttggtagctcttgatccggcaaacaaaccaccgctggtagcggtggtttttttgtttgcaagcagcagattacgcgcagaaaaaaaggatctcaagaagatcctttgatcttttctacggggtctgacgctcagtggaacgaaaactcacgttaagggattttggtcatgagattatcaaaaaggatcttcacctagatccttttaaattaaaaatgaagttttaaatcaatctaaagtatatatgagtaaacttggtctgacagttaccaatgcttaatcagtgaggcacctatctcagcgatctgtctatttcgttcatccatagttgcctgactcggggggggggggcgctgaggtctgcctcgtgaagaaggtgttgctgactcataccaggcctgaatcgccccatcatccagccagaaagtgagggagccacggttgatgagagctttgttgtaggtggaccagttggtgattttgaacttttgctttgccacggaacggtctgcgttgtcgggaagatgcgtgatctgatccttcaactcagcaaaagttcgatttattcaacaaagccgccgtcccgtcaagtcagcgtaatgctctgccagtgttacaaccaattaaccaattctgattagaaaaactcatcgagcatcaaatgaaactgcaatttattcatatcaggattatcaataccatatttttgaaaaagccgtttctgtaatgaaggagaaaactcaccgaggcagttccataggatggcaagatcctggtatcggtctgcgattccgactcgtccaacatcaatacaacctattaatttcccctcgtcaaaaataaggttatcaagtgagaaatcaccatgagtgacgactgaatccggtgagaatggcaaaagcttatgcatttctttccagacttgttcaacaggccagccattacgctcgtcatcaaaatcactcgcatcaaccaaaccgttattcattcgtgattgcgcctgagcgagacgaaatacgcgatcgctgttaaaaggacaattacaaacaggaatcgaatgcaaccggcgcaggaacactgccagcgcatcaacaatattttcacctgaatcaggatattcttctaatacctggaatgctgttttcccggggatcgcagtggtgagtaaccatgcatcatcaggagtacggataaaatgcttgatggtcggaagaggcataaattccgtcagccagtttagtctgaccatctcatctgtaacatcattggcaacgctacctttgccatgtttcagaaacaactctggcgcatcgggcttcccatacaatcgatagattgtcgcacctgattgcccgacattatcgcgagcccatttatacccatataaatcagcatccatgttggaatttaatcgcggcctcgagcaagacgtttcccgttgaatatggctcataacaccccttgtattactgtttatgtaagcagacagttttattgttcatgatgatatatttttatcttgtgcaatgtaacatcagagattttgagacacaacgtggctttccccccccccccattattgaagcatttatcagggttattgtctcatgagcggatacatatttgaatgtatttagaaaaataaacaaataggggttccgcgcacatttccccgaaaagtgccacctgacgtctaagaaaccattattatcatgacattaacctataaaaataggcgtatcacgaggccctttcgtc

SEQ ID NO: 143 - DNA, 6122 bp, Artificial Sequence
  Plasmid DNA: VRC 7751
tcgcgcgtttcggtgatgacggtgaaaacctctgacacatgcagctcccggagacggtcacagcttgtctgtaagcggatgccgggagcagacaagcccgtcagggcgcgtcagcgggtgttggcgggtgtcggggctggcttaactatgcggcatcagagcagattgtactgagagtgcaccatatgcggtgtgaaataccgcacagatgcgtaaggagaaaataccgcatcagattggctattggccattgcatacgttgtatccatatcataatatgtacatttatattggctcatgtccaacattaccgccatgttgacattgattattgactagttattaatagtaatcaattacggggtcattagttcatagcccatatatggagttccgcgttacataacttacggtaaatggcccgcctggctgaccgcccaacgacccccgcccattgacgtcaataatgacgtatgttcccatagtaacgccaatagggactttccattgacgtcaatgggtggagtatttacggtaaactgcccacttggcagtacatcaagtgtatcatatgccaagtacgccccctattgacgtcaatgacggtaaatggcccgcctggcattatgcccagtacatgaccttatgggactttcctacttggcagtacatctacgtattagtcatcgctattaccatggtgatgcggttttggcagtacatcaatgggcgtggatagcggtttgactcacggggatttccaagtctccaccccattgacgtcaatgggagtttgttttggcaccaaaatcaacgggactttccaaaatgtcgtaacaactccgccccattgacgcaaatgggcggtaggcgtgtacggtgggaggtctatataagcagagctcgtttagtgaaccgtcagatcgcctggagacgccatccacgctgttttgacctccatagaagacaccgggaccgatccagcctccatcggctcgcatctctccttcacgcgcccgccgccctacctgaggccgccatccacgccggttgagtcgcgttctgccgcctcccgcctgtggtgcctcctgaactgcgtccgccgtctaggtaagtttaaagctcaggtcgagaccgggcctttgtccggcgctcccttggagcctacctagactcagccggctctccacgctttgcctgaccctgcttgctcaactctagttaacggtggagggcagtgtagtctgagcagtactcgttgctgccgcgcgcgccaccagacataatagctgacagactaacagactgttcctttccatgggtcttttctgcagtcaccgtcgtcgacacgtgtgatcagatatcgcggccgctctagagatatcgccaccatggagaagattgtgctgctgctggccattgtgtctctggtgaagagcgaccagatctgtattggctaccacgccaacaattctacagagcaggtggacaccatcatggagaaaaacgtgacagtgacacacgcccaggatattctggagaaaacccacaatggcaagctgtgtgatctggatggagtgaagcctctgatcctgagagattgttctgtggccggatggctgctgggaaatcccatgtgtgacgagttcatcaatgtgcctgagtggagctatatcgtggagaaggccaaccctcctaatgatctgtgctaccccggcaacttcaatgattacgaggagctgaagcacctgctgtccagaatcaaccacttcgagaagatccagatcatccctaagtctagctggagcgatcacgaagcctcttctggagtgtctagcgcctgtccttatcagggcagaagcagcttcttcagaaacgtggtgtggctgatcaagaagaatagcgcctaccccacaatcaagcggagctacaacaacaccaaccaggaagatctgctggtgctgtggggaattcaccaccctaatgatgccgccgaacagacaagactgtaccagaaccccaccacatatatctctgtgggcaccagcacactgaatcagagactggtgcctaagatcgccacaagaagcaaagtgaacggccagtctggcagaatggagttcttctggaccatcctgaagccaaatgacgccatcagcttcgagagcaacggcaatttcatcgcccctgagtacgcctataagatcgtgaagaagggcgatagcgccatcatgaagagcgagctggagtacggcaactgtaataccaagtgccagacacctatgggcgccatcaatagctctatgcccttccacaatatccaccctctgacaatcggcgagtgtcctaagtacgtgaagagcagcagactggtgctggccacaggactgagaaatagccctcagagagagacaagaggactgtttggagccatcgccggctttattgagggaggatggcagggaatggtggatggctggtatggctatcaccacagcaatgagcagggatctggatatgccgccgataaggagtctacacagaaggccattgacggcgtgacaaacaaggtgaacagcatcatcgacaagatgaacacccagtttgaagctgtgggcagagagttcaacaacctggagcggagaatcgagaacctgaacaagaagatggaggacggctttctggatgtgtggacctataatgccgaactgctcgtgctgatggagaacgagagaaccctggatttccacgacagcaacgtgaagaacctgtacgacaaagtgagactgcagctgagagataatgccaaggaactgggcaatggctgcttcgagttctaccacagatgtgacaacgagtgtatcgagtctgtgagaaatggcacatacggctaccctcagtattctgaggaggccagactgaagagagaggagatctctggcgtgaagctggagagcatcggcacataccagatcctgagcatctatagcacagtggcctcttctctggccctggccattatggtggccggactgtctctgtggatgtgtagcaatggcagcctgcagtgcagaatctgtatctgatgaacacgtgggatccagatctgctgtgccttctagttgccagccatctgttgtttgcccctcccccgtgccttccttgaccctggaaggtgccactcccactgtcctttcctaataaaatgaggaaattgcatcgcattgtctgagtaggtgtcattctattctggggggtggggtggggcaggacagcaagggggaggattgggaagacaatagcaggcatgctggggatgcggtgggctctatgggtacccaggtgctgaagaattgacccggttcctcctgggccagaaagaagcaggcacatccccttctctgtgacacaccctgtccacgcccctggttcttagttccagccccactcataggacactcatagctcaggagggctccgccttcaatcccacccgctaaagtacttggagcggtctctccctccctcatcagcccaccaaaccaaacctagcctccaagagtgggaagaaattaaagcaagataggctattaagtgcagagggagagaaaatgcctccaacatgtgaggaagtaatgagagaaatcatagaattttaaggccatgatttaaggccatcatggccttaatcttccgcttcctcgctcactgactcgctgcgctcggtcgttcggctgcggcgagcggtatcagctcactcaaaggcggtaatacggttatccacagaatcaggggataacgcaggaaagaacatgtgagcaaaaggccagcaaaaggccaggaaccgtaaaaaggccgcgttgctggcgtttttccataggctccgcccccctgacgagcatcacaaaaatcgacgctcaagtcagaggtggcgaaacccgacaggactataaagataccaggcgtttccccctggaagctccctcgtgcgctctcctgttccgaccctgccgcttaccggatacctgtccgcctttctcccttcgggaagcgtggcgctttctcatagctcacgctgtaggtatctcagttcggtgtaggtcgttcgctccaagctgggctgtgtgcacgaaccccccgttcagcccgaccgctgcgccttatccggtaactatcgtcttgagtccaacccggtaagacacgacttatcgccactggcagcagccactggtaacaggattagcagagcgaggtatgtaggcggtgctacagagttcttgaagtggtggcctaactacggctacactagaagaacagtatttggtatctgcgctctgctgaagccagttaccttcggaaaaagagttggtagctcttgatccggcaaacaaaccaccgctggtagcggtggtttttttgtttgcaagcagcagattacgcgcagaaaaaaaggatctcaagaagatcctttgatcttttctacggggtctgacgctcagtggaacgaaaactcacgttaagggattttggtcatgagattatcaaaaaggatcttcacctagatccttttaaattaaaaatgaagttttaaatcaatctaaagtatatatgagtaaacttggtctgacagttaccaatgcttaatcagtgaggcacctatctcagcgatctgtctatttcgttcatccatagttgcctgactcggggggggggggcgctgaggtctgcctcgtgaagaaggtgttgctgactcataccaggcctgaatcgccccatcatccagccagaaagtgagggagccacggttgatgagagctttgttgtaggtggaccagttggtgattttgaacttttgctttgccacggaacggtctgcgttgtcgggaagatgcgtgatctgatccttcaactcagcaaaagttcgatttattcaacaaagccgccgtcccgtcaagtcagcgtaatgctctgccagtgttacaaccaattaaccaattctgattagaaaaactcatcgagcatcaaatgaaactgcaatttattcatatcaggattatcaataccatatttttgaaaaagccgtttctgtaatgaaggagaaaactcaccgaggcagttccataggatggcaagatcctggtatcggtctgcgattccgactcgtccaacatcaatacaacctattaatttcccctcgtcaaaaataaggttatcaagtgagaaatcaccatgagtgacgactgaatccggtgagaatggcaaaagcttatgcatttctttccagacttgttcaacaggccagccattacgctcgtcatcaaaatcactcgcatcaaccaaaccgttattcattcgtgattgcgcctgagcgagacgaaatacgcgatcgctgttaaaaggacaattacaaacaggaatcgaatgcaaccggcgcaggaacactgccagcgcatcaacaatattttcacctgaatcaggatattcttctaatacctggaatgctgttttcccggggatcgcagtggtgagtaaccatgcatcatcaggagtacggataaaatgcttgatggtcggaagaggcataaattccgtcagccagtttagtctgaccatctcatctgtaacatcattggcaacgctacctttgccatgtttcagaaacaactctggcgcatcgggcttcccatacaatcgatagattgtcgcacctgattgcccgacattatcgcgagcccatttatacccatataaatcagcatccatgttggaatttaatcgcggcctcgagcaagacgtttcccgttgaatatggctcataacaccccttgtattactgtttatgtaagcagacagttttattgttcatgatgatatatttttatcttgtgcaatgtaacatcagagattttgagacacaacgtggctttccccccccccccattattgaagcatttatcagggttattgtctcatgagcggatacatatttgaatgtatttagaaaaataaacaaataggggttccgcgcacatttccccgaaaagtgccacctgacgtctaagaaaccattattatcatgacattaacctataaaaataggcgtatcacgaggccctttcgtc

SEQ ID NO: 144 - DNA, 6149 bp, Artificial Sequence
  Plasmid DNA: VRC 7752
tcgcgcgtttcggtgatgacggtgaaaacctctgacacatgcagctcccggagacggtcacagcttgtctgtaagcggatgccgggagcagacaagcccgtcagggcgcgtcagcgggtgttggcgggtgtcggggctggcttaactatgcggcatcagagcagattgtactgagagtgcaccatatgcggtgtgaaataccgcacagatgcgtaaggagaaaataccgcatcagattggctattggccattgcatacgttgtatccatatcataatatgtacatttatattggctcatgtccaacattaccgccatgttgacattgattattgactagttattaatagtaatcaattacggggtcattagttcatagcccatatatggagttccgcgttacataacttacggtaaatggcccgcctggctgaccgcccaacgacccccgcccattgacgtcaataatgacgtatgttcccatagtaacgccaatagggactttccattgacgtcaatgggtggagtatttacggtaaactgcccacttggcagtacatcaagtgtatcatatgccaagtacgccccctattgacgtcaatgacggtaaatggcccgcctggcattatgcccagtacatgaccttatgggactttcctacttggcagtacatctacgtattagtcatcgctattaccatggtgatgcggttttggcagtacatcaatgggcgtggatagcggtttgactcacggggatttccaagtctccaccccattgacgtcaatgggagtttgttttggcaccaaaatcaacgggactttccaaaatgtcgtaacaactccgccccattgacgcaaatgggcggtaggcgtgtacggtgggaggtctatataagcagagctcgtttagtgaaccgtcagatcgcctggagacgccatccacgctgttttgacctccatagaagacaccgggaccgatccagcctccatcggctcgcatctctccttcacgcgcccgccgccctacctgaggccgccatccacgccggttgagtcgcgttctgccgcctcccgcctgtggtgcctcctgaactgcgtccgccgtctaggtaagtttaaagctcaggtcgagaccgggcctttgtccggcgctcccttggagcctacctagactcagccggctctccacgctttgcctgaccctgcttgctcaactctagttaacggtggagggcagtgtagtctgagcagtactcgttgctgccgcgcgcgccaccagacataatagctgacagactaacagactgttcctttccatgggtcttttctgcagtcaccgtcgtcgacacgtgtgatcagatatcgcggccgctctagagatatcgccaccatggagaagattgtgctgctgctggccattgtgtctctggtgaagagcgaccagatctgtattggctaccacgccaacaattctacagagcaggtggacaccatcatggagaaaaacgtgacagtgacacacgcccaggatattctggagaaaacccacaatggcaagctgtgtgatctggatggagtgaagcctctgatcctgagagattgttctgtggccggatggctgctgggaaatcccatgtgtgacgagttcatcaatgtgcctgagtggagctatatcgtggagaaggccaaccctcctaatgatctgtgctaccccggcaacttcaatgattacgaggagctgaagcacctgctgtccagaatcaaccacttcgagaagatccagatcatccctaagtctagctggagcgatcacgaagcctcttctggagtgtctagcgcctgtccttatcagggcagaagcagcttcttcagaaacgtggtgtggctgatcaagaagaatagcgcctaccccacaatcaagcggagctacaacaacaccaaccaggaagatctgctggtgctgtggggaattcaccaccctaatgatgccgccgaacagacaagactgtaccagaaccccaccacatatatctctgtgggcaccagcacactgaatcagagactggtgcctaagatcgccacaagaagcaaagtgaacggccagtctggcagaatggagttcttctggaccatcctgaagccaaatgacgccatcagcttcgagagcaacggcaatttcatcgcccctgagtacgcctataagatcgtgaagaagggcgatagcgccatcatgaagagcgagctggagtacggcaactgtaataccaagtgccagacacctatgggcgccatcaatagctctatgcccttccacaatatccaccctctgacaatcggcgagtgtcctaagtacgtgaagagcagcagactggtgctggccacaggactgagaaatagccctcagagagagacaagaggactgtttggagccatcgccggctttattgagggaggatggcagggaatggtggatggctggtatggctatcaccacagcaatgagcagggatctggatatgccgccgataaggagtctacacagaaggccattgacggcgtgacaaacaaggtgaacagcatcatcgacaagatgaacacccagtttgaagctgtgggcagagagttcaacaacctggagcggagaatcgagaacctgaacaagaagatggaggacggctttctggatgtgtggacctataatgccgaactgctcgtgctgatggagaacgagagaaccctggatttccacgacagcaacgtgaagaacctgtacgacaaagtgagactgcagctgagagataatgccaaggaactgggcaatggctgcttcgagttctaccacagatgtgacaacgagtgtatcgagtctgtgagaaatggcacatacggctaccctcagtattctgaggaggccagactgaagagagaggagatctctggcgtgaagctggagagcatcggcacataccagatcagaagcctggtgcctagaggatctcctggcagcggatatattcctgaggcccctagagatggacaggcctatgtgagaaaggatggcgaatgggtgctgctgtctacatttctgggacaccaccatcaccaccattgatgaacacgtgggatccagatctgctgtgccttctagttgccagccatctgttgtttgcccctcccccgtgccttccttgaccctggaaggtgccactcccactgtcctttcctaataaaatgaggaaattgcatcgcattgtctgagtaggtgtcattctattctggggggtggggtggggcaggacagcaagggggaggattgggaagacaatagcaggcatgctggggatgcggtgggctctatgggtacccaggtgctgaagaattgacccggttcctcctgggccagaaagaagcaggcacatccccttctctgtgacacaccctgtccacgcccctggttcttagttccagccccactcataggacactcatagctcaggagggctccgccttcaatcccacccgctaaagtacttggagcggtctctccctccctcatcagcccaccaaaccaaacctagcctccaagagtgggaagaaattaaagcaagataggctattaagtgcagagggagagaaaatgcctccaacatgtgaggaagtaatgagagaaatcatagaattttaaggccatgatttaaggccatcatggccttaatcttccgcttcctcgctcactgactcgctgcgctcggtcgttcggctgcggcgagcggtatcagctcactcaaaggcggtaatacggttatccacagaatcaggggataacgcaggaaagaacatgtgagcaaaaggccagcaaaaggccaggaaccgtaaaaaggccgcgttgctggcgtttttccataggctccgcccccctgacgagcatcacaaaaatcgacgctcaagtcagaggtggcgaaacccgacaggactataaagataccaggcgtttccccctggaagctccctcgtgcgctctcctgttccgaccctgccgcttaccggatacctgtccgcctttctcccttcgggaagcgtggcgctttctcatagctcacgctgtaggtatctcagttcggtgtaggtcgttcgctccaagctgggctgtgtgcacgaaccccccgttcagcccgaccgctgcgccttatccggtaactatcgtcttgagtccaacccggtaagacacgacttatcgccactggcagcagccactggtaacaggattagcagagcgaggtatgtaggcggtgctacagagttcttgaagtggtggcctaactacggctacactagaagaacagtatttggtatctgcgctctgctgaagccagttaccttcggaaaaagagttggtagctcttgatccggcaaacaaaccaccgctggtagcggtggtttttttgtttgcaagcagcagattacgcgcagaaaaaaaggatctcaagaagatcctttgatcttttctacggggtctgacgctcagtggaacgaaaactcacgttaagggattttggtcatgagattatcaaaaaggatcttcacctagatccttttaaattaaaaatgaagttttaaatcaatctaaagtatatatgagtaaacttggtctgacagttaccaatgcttaatcagtgaggcacctatctcagcgatctgtctatttcgttcatccatagttgcctgactcggggggggggggcgctgaggtctgcctcgtgaagaaggtgttgctgactcataccaggcctgaatcgccccatcatccagccagaaagtgagggagccacggttgatgagagctttgttgtaggtggaccagttggtgattttgaacttttgctttgccacggaacggtctgcgttgtcgggaagatgcgtgatctgatccttcaactcagcaaaagttcgatttattcaacaaagccgccgtcccgtcaagtcagcgtaatgctctgccagtgttacaaccaattaaccaattctgattagaaaaactcatcgagcatcaaatgaaactgcaatttattcatatcaggattatcaataccatatttttgaaaaagccgtttctgtaatgaaggagaaaactcaccgaggcagttccataggatggcaagatcctggtatcggtctgcgattccgactcgtccaacatcaatacaacctattaatttcccctcgtcaaaaataaggttatcaagtgagaaatcaccatgagtgacgactgaatccggtgagaatggcaaaagcttatgcatttctttccagacttgttcaacaggccagccattacgctcgtcatcaaaatcactcgcatcaaccaaaccgttattcattcgtgattgcgcctgagcgagacgaaatacgcgatcgctgttaaaaggacaattacaaacaggaatcgaatgcaaccggcgcaggaacactgccagcgcatcaacaatattttcacctgaatcaggatattcttctaatacctggaatgctgttttcccggggatcgcagtggtgagtaaccatgcatcatcaggagtacggataaaatgcttgatggtcggaagaggcataaattccgtcagccagtttagtctgaccatctcatctgtaacatcattggcaacgctacctttgccatgtttcagaaacaactctggcgcatcgggcttcccatacaatcgatagattgtcgcacctgattgcccgacattatcgcgagcccatttatacccatataaatcagcatccatgttggaatttaatcgcggcctcgagcaagacgtttcccgttgaatatggctcataacaccccttgtattactgtttatgtaagcagacagttttattgttcatgatgatatatttttatcttgtgcaatgtaacatcagagattttgagacacaacgtggctttccccccccccccattattgaagcatttatcagggttattgtctcatgagcggatacatatttgaatgtatttagaaaaataaacaaataggggttccgcgcacatttccccgaaaagtgccacctgacgtctaagaaaccattattatcatgacattaacctataaaaataggcgtatcacgaggccctttcgtc

SEQ ID NO: 145 - DNA, 6128 bp, Artificial Sequence
  Plasmid DNA: VRC 7753
tcgcgcgtttcggtgatgacggtgaaaacctctgacacatgcagctcccggagacggtcacagcttgtctgtaagcggatgccgggagcagacaagcccgtcagggcgcgtcagcgggtgttggcgggtgtcggggctggcttaactatgcggcatcagagcagattgtactgagagtgcaccatatgcggtgtgaaataccgcacagatgcgtaaggagaaaataccgcatcagattggctattggccattgcatacgttgtatccatatcataatatgtacatttatattggctcatgtccaacattaccgccatgttgacattgattattgactagttattaatagtaatcaattacggggtcattagttcatagcccatatatggagttccgcgttacataacttacggtaaatggcccgcctggctgaccgcccaacgacccccgcccattgacgtcaataatgacgtatgttcccatagtaacgccaatagggactttccattgacgtcaatgggtggagtatttacggtaaactgcccacttggcagtacatcaagtgtatcatatgccaagtacgccccctattgacgtcaatgacggtaaatggcccgcctggcattatgcccagtacatgaccttatgggactttcctacttggcagtacatctacgtattagtcatcgctattaccatggtgatgcggttttggcagtacatcaatgggcgtggatagcggtttgactcacggggatttccaagtctccaccccattgacgtcaatgggagtttgttttggcaccaaaatcaacgggactttccaaaatgtcgtaacaactccgccccattgacgcaaatgggcggtaggcgtgtacggtgggaggtctatataagcagagctcgtttagtgaaccgtcagatcgcctggagacgccatccacgctgttttgacctccatagaagacaccgggaccgatccagcctccatcggctcgcatctctccttcacgcgcccgccgccctacctgaggccgccatccacgccggttgagtcgcgttctgccgcctcccgcctgtggtgcctcctgaactgcgtccgccgtctaggtaagtttaaagctcaggtcgagaccgggcctttgtccggcgctcccttggagcctacctagactcagccggctctccacgctttgcctgaccctgcttgctcaactctagttaacggtggagggcagtgtagtctgagcagtactcgttgctgccgcgcgcgccaccagacataatagctgacagactaacagactgttcctttccatgggtcttttctgcagtcaccgtcgtcgacacgtgtgatcagatatcgcggccgctctagagatatcgccaccatggaagccagactgctggtgctgctgtgtgcctttgccgccacaaatgcagatacaatctgtattggctaccacgccaacaatagcaccgataccgtggatacagtgctggagaagaatgtgaccgtgacccactctgtgaatctgctggaggatagccacaatggcaagctgtgtaagctgaaaggaattgcccctctgcagctgggcaaatgtaatattgccggctggctgctgggaaatcctgaatgtgatctgctgctgacagccagcagctggtcttatatcgtggagaccagcaatagcgagaatggcacctgttaccctggcgacttcatcgattacgaggagctgagagaacagctgtctagcgtgtccagcttcgagaagttcgagatcttccctaagacaagcagctggcctaatcacgagacaacaaagggagtgacagccgcctgttcttatgccggagccagctccttttacagaaacctgctgtggctgacaaagaagggcagcagctaccctaagctgtctaagagctacgtgaacaacaagggcaaagaagtgctggtgctgtggggagtgcaccaccctcctacaggaacagatcagcagagcctgtaccagaatgccgatgcctatgtgtctgtgggcagcagcaagtacaacagaagattcacccctgaaattgccgccagacccaaagtgagagatcaggccggcagaatgaattactactggaccctgctggaacctggcgataccatcacatttgaggccaccggaaatctgattgccccttggtatgcctttgccctgaatagaggctctggctctggcatcattacatctgatgcccctgtgcacgactgtaataccaagtgtcagacacctcacggcgccattaatagcagcctgcccttccagaatattcaccctgtgaccatcggcgagtgtcctaagtatgtgaggagcaccaaactgagaatggccaccggcctgagaaatatccctagcatccagagcagaggactgtttggagccatcgccggctttattgagggaggatggaccggaatgatcgatggctggtacggctatcaccaccagaatgagcagggatctggatatgccgccgatcagaagtctacacagaacgccatcgacggcatcacaaacaaggtgaacagcgtgatcgagaagatgaacacccagtttacagctgtgggcaaggagttcaacaacctggagcggagaatcgagaacctgaacaagaaagtggacgacggcttcctggatatttggacctacaatgccgagctgctcgtgctcctggagaatgagagaaccctggacttccacgacagcaatgtgagaaacctgtacgagaaggtgaagagccagctgaagaacaatgccaaggagatcggcaacggctgctttgagttctaccacaagtgtgacgatgcctgtatggagtctgtgagaaacggcacctacgactaccctaagtatagcgaggagagcaagctgaatagagaggagatcgacggcgtgaaactggaaagcatgggcgtgtatcagatcctggccatctattctacagtggcctcttctctggtgctcctggtgtctctgggagccatcagcttttggatgtgtagcaatggcagcctgcagtgcagaatctgtatctgatgaacacgtgggatccagatctgctgtgccttctagttgccagccatctgttgtttgcccctcccccgtgccttccttgaccctggaaggtgccactcccactgtcctttcctaataaaatgaggaaattgcatcgcattgtctgagtaggtgtcattctattctggggggtggggtggggcaggacagcaagggggaggattgggaagacaatagcaggcatgctggggatgcggtgggctctatgggtacccaggtgctgaagaattgacccggttcctcctgggccagaaagaagcaggcacatccccttctctgtgacacaccctgtccacgcccctggttcttagttccagccccactcataggacactcatagctcaggagggctccgccttcaatcccacccgctaaagtacttggagcggtctctccctccctcatcagcccaccaaaccaaacctagcctccaagagtgggaagaaattaaagcaagataggctattaagtgcagagggagagaaaatgcctccaacatgtgaggaagtaatgagagaaatcatagaattttaaggccatgatttaaggccatcatggccttaatcttccgcttcctcgctcactgactcgctgcgctcggtcgttcggctgcggcgagcggtatcagctcactcaaaggcggtaatacggttatccacagaatcaggggataacgcaggaaagaacatgtgagcaaaaggccagcaaaaggccaggaaccgtaaaaaggccgcgttgctggcgtttttccataggctccgcccccctgacgagcatcacaaaaatcgacgctcaagtcagaggtggcgaaacccgacaggactataaagataccaggcgtttccccctggaagctccctcgtgcgctctcctgttccgaccctgccgcttaccggatacctgtccgcctttctcccttcgggaagcgtggcgctttctcatagctcacgctgtaggtatctcagttcggtgtaggtcgttcgctccaagctgggctgtgtgcacgaaccccccgttcagcccgaccgctgcgccttatccggtaactatcgtcttgagtccaacccggtaagacacgacttatcgccactggcagcagccactggtaacaggattagcagagcgaggtatgtaggcggtgctacagagttcttgaagtggtggcctaactacggctacactagaagaacagtatttggtatctgcgctctgctgaagccagttaccttcggaaaaagagttggtagctcttgatccggcaaacaaaccaccgctggtagcggtggtttttttgtttgcaagcagcagattacgcgcagaaaaaaaggatctcaagaagatcctttgatcttttctacggggtctgacgctcagtggaacgaaaactcacgttaagggattttggtcatgagattatcaaaaaggatcttcacctagatccttttaaattaaaaatgaagttttaaatcaatctaaagtatatatgagtaaacttggtctgacagttaccaatgcttaatcagtgaggcacctatctcagcgatctgtctatttcgttcatccatagttgcctgactcggggggggggggcgctgaggtctgcctcgtgaagaaggtgttgctgactcataccaggcctgaatcgccccatcatccagccagaaagtgagggagccacggttgatgagagctttgttgtaggtggaccagttggtgattttgaacttttgctttgccacggaacggtctgcgttgtcgggaagatgcgtgatctgatccttcaactcagcaaaagttcgatttattcaacaaagccgccgtcccgtcaagtcagcgtaatgctctgccagtgttacaaccaattaaccaattctgattagaaaaactcatcgagcatcaaatgaaactgcaatttattcatatcaggattatcaataccatatttttgaaaaagccgtttctgtaatgaaggagaaaactcaccgaggcagttccataggatggcaagatcctggtatcggtctgcgattccgactcgtccaacatcaatacaacctattaatttcccctcgtcaaaaataaggttatcaagtgagaaatcaccatgagtgacgactgaatccggtgagaatggcaaaagcttatgcatttctttccagacttgttcaacaggccagccattacgctcgtcatcaaaatcactcgcatcaaccaaaccgttattcattcgtgattgcgcctgagcgagacgaaatacgcgatcgctgttaaaaggacaattacaaacaggaatcgaatgcaaccggcgcaggaacactgccagcgcatcaacaatattttcacctgaatcaggatattcttctaatacctggaatgctgttttcccggggatcgcagtggtgagtaaccatgcatcatcaggagtacggataaaatgcttgatggtcggaagaggcataaattccgtcagccagtttagtctgaccatctcatctgtaacatcattggcaacgctacctttgccatgtttcagaaacaactctggcgcatcgggcttcccatacaatcgatagattgtcgcacctgattgcccgacattatcgcgagcccatttatacccatataaatcagcatccatgttggaatttaatcgcggcctcgagcaagacgtttcccgttgaatatggctcataacaccccttgtattactgtttatgtaagcagacagttttattgttcatgatgatatatttttatcttgtgcaatgtaacatcagagattttgagacacaacgtggctttccccccccccccattattgaagcatttatcagggttattgtctcatgagcggatacatatttgaatgtatttagaaaaataaacaaataggggttccgcgcacatttccccgaaaagtgccacctgacgtctaagaaaccattattatcatgacattaacctataaaaataggcgtatcacgaggccctttcgtc

SEQ ID NO: 146 - DNA, 6128 bp, Artificial Sequence
  Plasmid DNA: VRC 7754
tcgcgcgtttcggtgatgacggtgaaaacctctgacacatgcagctcccggagacggtcacagcttgtctgtaagcggatgccgggagcagacaagcccgtcagggcgcgtcagcgggtgttggcgggtgtcggggctggcttaactatgcggcatcagagcagattgtactgagagtgcaccatatgcggtgtgaaataccgcacagatgcgtaaggagaaaataccgcatcagattggctattggccattgcatacgttgtatccatatcataatatgtacatttatattggctcatgtccaacattaccgccatgttgacattgattattgactagttattaatagtaatcaattacggggtcattagttcatagcccatatatggagttccgcgttacataacttacggtaaatggcccgcctggctgaccgcccaacgacccccgcccattgacgtcaataatgacgtatgttcccatagtaacgccaatagggactttccattgacgtcaatgggtggagtatttacggtaaactgcccacttggcagtacatcaagtgtatcatatgccaagtacgccccctattgacgtcaatgacggtaaatggcccgcctggcattatgcccagtacatgaccttatgggactttcctacttggcagtacatctacgtattagtcatcgctattaccatggtgatgcggttttggcagtacatcaatgggcgtggatagcggtttgactcacggggatttccaagtctccaccccattgacgtcaatgggagtttgttttggcaccaaaatcaacgggactttccaaaatgtcgtaacaactccgccccattgacgcaaatgggcggtaggcgtgtacggtgggaggtctatataagcagagctcgtttagtgaaccgtcagatcgcctggagacgccatccacgctgttttgacctccatagaagacaccgggaccgatccagcctccatcggctcgcatctctccttcacgcgcccgccgccctacctgaggccgccatccacgccggttgagtcgcgttctgccgcctcccgcctgtggtgcctcctgaactgcgtccgccgtctaggtaagtttaaagctcaggtcgagaccgggcctttgtccggcgctcccttggagcctacctagactcagccggctctccacgctttgcctgaccctgcttgctcaactctagttaacggtggagggcagtgtagtctgagcagtactcgttgctgccgcgcgcgccaccagacataatagctgacagactaacagactgttcctttccatgggtcttttctgcagtcaccgtcgtcgacacgtgtgatcagatatcgcggccgctctagagatatcgccaccatggaagccagactgctggtgctgctgtgtgcctttgccgccacaaatgcagatacaatctgtattggctaccacgccaacaatagcaccgataccgtggatacagtgctggagaagaatgtgaccgtgacccactctgtgaatctgctggaggatagccacaatggcaagctgtgtaagctgaaaggaattgcccctctgcagctgggcaaatgtaatattgccggctggctgctgggaaatcctgaatgtgatctgctgctgacagccagcagctggtcttatatcgtggagaccagcaatagcgagaatggcacctgttaccctggcgacttcatcgattacgaggagctgagagaacagctgtctagcgtgtccagcttcgagaagttcgagatcttccctaagacaagcagctggcctaatcacgagacaacaaagggagtgacagccgcctgttcttatgccggagccagctccttttacagaaacctgctgtggctgacaaagaagggcagcagctaccctaagctgtctaagagctacgtgaacaacaagggcaaagaagtgctggtgctgtggggagtgcaccaccctcctacaggaacagatcagcagagcctgtaccagaatgccgatgcctatgtgtctgtgggcagcagcaagtacaacagaagattcacccctgaaattgccgccagacccaaagtgagagatcaggccggcagaatgaattactactggaccctgctggaacctggcgataccatcacatttgaggccaccggaaatctgattgccccttggtatgcctttgccctgaatagaggctctggctctggcatcattacatctgatgcccctgtgcacgactgtaataccaagtgtcagacacctcacggcgccattaatagcagcctgcccttccagaatattcaccctgtgaccatcggcgagtgtcctaagtatgtgaggagcaccaaactgagaatggccaccggcctgagaaatatccctcagagagagaccagaggactgtttggagccatcgccggctttattgagggaggatggaccggaatgatcgatggctggtacggctatcaccaccagaatgagcagggatctggatatgccgccgatcagaagtctacacagaacgccatcgacggcatcacaaacaaggtgaacagcgtgatcgagaagatgaacacccagtttacagctgtgggcaaggagttcaacaacctggagcggagaatcgagaacctgaacaagaaagtggacgacggcttcctggatatttggacctacaatgccgagctgctcgtgctcctggagaatgagagaaccctggacttccacgacagcaatgtgagaaacctgtacgagaaggtgaagagccagctgaagaacaatgccaaggagatcggcaacggctgctttgagttctaccacaagtgtgacgatgcctgtatggagtctgtgagaaacggcacctacgactaccctaagtatagcgaggagagcaagctgaatagagaggagatcgacggcgtgaaactggaaagcatgggcgtgtatcagatcctggccatctattctacagtggcctcttctctggtgctcctggtgtctctgggagccatcagcttttggatgtgtagcaatggcagcctgcagtgcagaatctgtatctgatgaacacgtgggatccagatctgctgtgccttctagttgccagccatctgttgtttgcccctcccccgtgccttccttgaccctggaaggtgccactcccactgtcctttcctaataaaatgaggaaattgcatcgcattgtctgagtaggtgtcattctattctggggggtggggtggggcaggacagcaagggggaggattgggaagacaatagcaggcatgctggggatgcggtgggctctatgggtacccaggtgctgaagaattgacccggttcctcctgggccagaaagaagcaggcacatccccttctctgtgacacaccctgtccacgcccctggttcttagttccagccccactcataggacactcatagctcaggagggctccgccttcaatcccacccgctaaagtacttggagcggtctctccctccctcatcagcccaccaaaccaaacctagcctccaagagtgggaagaaattaaagcaagataggctattaagtgcagagggagagaaaatgcctccaacatgtgaggaagtaatgagagaaatcatagaattttaaggccatgatttaaggccatcatggccttaatcttccgcttcctcgctcactgactcgctgcgctcggtcgttcggctgcggcgagcggtatcagctcactcaaaggcggtaatacggttatccacagaatcaggggataacgcaggaaagaacatgtgagcaaaaggccagcaaaaggccaggaaccgtaaaaaggccgcgttgctggcgtttttccataggctccgcccccctgacgagcatcacaaaaatcgacgctcaagtcagaggtggcgaaacccgacaggactataaagataccaggcgtttccccctggaagctccctcgtgcgctctcctgttccgaccctgccgcttaccggatacctgtccgcctttctcccttcgggaagcgtggcgctttctcatagctcacgctgtaggtatctcagttcggtgtaggtcgttcgctccaagctgggctgtgtgcacgaaccccccgttcagcccgaccgctgcgccttatccggtaactatcgtcttgagtccaacccggtaagacacgacttatcgccactggcagcagccactggtaacaggattagcagagcgaggtatgtaggcggtgctacagagttcttgaagtggtggcctaactacggctacactagaagaacagtatttggtatctgcgctctgctgaagccagttaccttcggaaaaagagttggtagctcttgatccggcaaacaaaccaccgctggtagcggtggtttttttgtttgcaagcagcagattacgcgcagaaaaaaaggatctcaagaagatcctttgatcttttctacggggtctgacgctcagtggaacgaaaactcacgttaagggattttggtcatgagattatcaaaaaggatcttcacctagatccttttaaattaaaaatgaagttttaaatcaatctaaagtatatatgagtaaacttggtctgacagttaccaatgcttaatcagtgaggcacctatctcagcgatctgtctatttcgttcatccatagttgcctgactcggggggggggggcgctgaggtctgcctcgtgaagaaggtgttgctgactcataccaggcctgaatcgccccatcatccagccagaaagtgagggagccacggttgatgagagctttgttgtaggtggaccagttggtgattttgaacttttgctttgccacggaacggtctgcgttgtcgggaagatgcgtgatctgatccttcaactcagcaaaagttcgatttattcaacaaagccgccgtcccgtcaagtcagcgtaatgctctgccagtgttacaaccaattaaccaattctgattagaaaaactcatcgagcatcaaatgaaactgcaatttattcatatcaggattatcaataccatatttttgaaaaagccgtttctgtaatgaaggagaaaactcaccgaggcagttccataggatggcaagatcctggtatcggtctgcgattccgactcgtccaacatcaatacaacctattaatttcccctcgtcaaaaataaggttatcaagtgagaaatcaccatgagtgacgactgaatccggtgagaatggcaaaagcttatgcatttctttccagacttgttcaacaggccagccattacgctcgtcatcaaaatcactcgcatcaaccaaaccgttattcattcgtgattgcgcctgagcgagacgaaatacgcgatcgctgttaaaaggacaattacaaacaggaatcgaatgcaaccggcgcaggaacactgccagcgcatcaacaatattttcacctgaatcaggatattcttctaatacctggaatgctgttttcccggggatcgcagtggtgagtaaccatgcatcatcaggagtacggataaaatgcttgatggtcggaagaggcataaattccgtcagccagtttagtctgaccatctcatctgtaacatcattggcaacgctacctttgccatgtttcagaaacaactctggcgcatcgggcttcccatacaatcgatagattgtcgcacctgattgcccgacattatcgcgagcccatttatacccatataaatcagcatccatgttggaatttaatcgcggcctcgagcaagacgtttcccgttgaatatggctcataacaccccttgtattactgtttatgtaagcagacagttttattgttcatgatgatatatttttatcttgtgcaatgtaacatcagagattttgagacacaacgtggctttccccccccccccattattgaagcatttatcagggttattgtctcatgagcggatacatatttgaatgtatttagaaaaataaacaaataggggttccgcgcacatttccccgaaaagtgccacctgacgtctaagaaaccattattatcatgacattaacctataaaaataggcgtatcacgaggccctttcgtc

SEQ ID NO: 147 - DNA, 6155 bp, Artificial Sequence
  Plasmid DNA: VRC 7755
tcgcgcgtttcggtgatgacggtgaaaacctctgacacatgcagctcccggagacggtcacagcttgtctgtaagcggatgccgggagcagacaagcccgtcagggcgcgtcagcgggtgttggcgggtgtcggggctggcttaactatgcggcatcagagcagattgtactgagagtgcaccatatgcggtgtgaaataccgcacagatgcgtaaggagaaaataccgcatcagattggctattggccattgcatacgttgtatccatatcataatatgtacatttatattggctcatgtccaacattaccgccatgttgacattgattattgactagttattaatagtaatcaattacggggtcattagttcatagcccatatatggagttccgcgttacataacttacggtaaatggcccgcctggctgaccgcccaacgacccccgcccattgacgtcaataatgacgtatgttcccatagtaacgccaatagggactttccattgacgtcaatgggtggagtatttacggtaaactgcccacttggcagtacatcaagtgtatcatatgccaagtacgccccctattgacgtcaatgacggtaaatggcccgcctggcattatgcccagtacatgaccttatgggactttcctacttggcagtacatctacgtattagtcatcgctattaccatggtgatgcggttttggcagtacatcaatgggcgtggatagcggtttgactcacggggatttccaagtctccaccccattgacgtcaatgggagtttgttttggcaccaaaatcaacgggactttccaaaatgtcgtaacaactccgccccattgacgcaaatgggcggtaggcgtgtacggtgggaggtctatataagcagagctcgtttagtgaaccgtcagatcgcctggagacgccatccacgctgttttgacctccatagaagacaccgggaccgatccagcctccatcggctcgcatctctccttcacgcgcccgccgccctacctgaggccgccatccacgccggttgagtcgcgttctgccgcctcccgcctgtggtgcctcctgaactgcgtccgccgtctaggtaagtttaaagctcaggtcgagaccgggcctttgtccggcgctcccttggagcctacctagactcagccggctctccacgctttgcctgaccctgcttgctcaactctagttaacggtggagggcagtgtagtctgagcagtactcgttgctgccgcgcgcgccaccagacataatagctgacagactaacagactgttcctttccatgggtcttttctgcagtcaccgtcgtcgacacgtgtgatcagatatcgcggccgctctagagatatcgccaccatggaagccagactgctggtgctgctgtgtgcctttgccgccacaaatgcagatacaatctgtattggctaccacgccaacaatagcaccgataccgtggatacagtgctggagaagaatgtgaccgtgacccactctgtgaatctgctggaggatagccacaatggcaagctgtgtaagctgaaaggaattgcccctctgcagctgggcaaatgtaatattgccggctggctgctgggaaatcctgaatgtgatctgctgctgacagccagcagctggtcttatatcgtggagaccagcaatagcgagaatggcacctgttaccctggcgacttcatcgattacgaggagctgagagaacagctgtctagcgtgtccagcttcgagaagttcgagatcttccctaagacaagcagctggcctaatcacgagacaacaaagggagtgacagccgcctgttcttatgccggagccagctccttttacagaaacctgctgtggctgacaaagaagggcagcagctaccctaagctgtctaagagctacgtgaacaacaagggcaaagaagtgctggtgctgtggggagtgcaccaccctcctacaggaacagatcagcagagcctgtaccagaatgccgatgcctatgtgtctgtgggcagcagcaagtacaacagaagattcacccctgaaattgccgccagacccaaagtgagagatcaggccggcagaatgaattactactggaccctgctggaacctggcgataccatcacatttgaggccaccggaaatctgattgccccttggtatgcctttgccctgaatagaggctctggctctggcatcattacatctgatgcccctgtgcacgactgtaataccaagtgtcagacacctcacggcgccattaatagcagcctgcccttccagaatattcaccctgtgaccatcggcgagtgtcctaagtatgtgaggagcaccaaactgagaatggccaccggcctgagaaatatccctcagagagagaccagaggactgtttggagccatcgccggctttattgagggaggatggaccggaatgatcgatggctggtacggctatcaccaccagaatgagcagggatctggatatgccgccgatcagaagtctacacagaacgccatcgacggcatcacaaacaaggtgaacagcgtgatcgagaagatgaacacccagtttacagctgtgggcaaggagttcaacaacctggagcggagaatcgagaacctgaacaagaaagtggacgacggcttcctggatatttggacctacaatgccgagctgctcgtgctcctggagaatgagagaaccctggacttccacgacagcaatgtgagaaacctgtacgagaaggtgaagagccagctgaagaacaatgccaaggagatcggcaacggctgctttgagttctaccacaagtgtgacgatgcctgtatggagtctgtgagaaacggcacctacgactaccctaagtatagcgaggagagcaagctgaatagagaggagatcgacggcgtgaaactggaaagcatgggcgtgtatcagatcagaagcctggtgcctagaggatctcctggcagcggatatattcctgaggcccctagagatggacaggcctatgtgagaaaggatggcgaatgggtgctgctgtctacatttctgggacaccaccatcaccaccattgatgaacacgtgggatccagatctgctgtgccttctagttgccagccatctgttgtttgcccctcccccgtgccttccttgaccctggaaggtgccactcccactgtcctttcctaataaaatgaggaaattgcatcgcattgtctgagtaggtgtcattctattctggggggtggggtggggcaggacagcaagggggaggattgggaagacaatagcaggcatgctggggatgcggtgggctctatgggtacccaggtgctgaagaattgacccggttcctcctgggccagaaagaagcaggcacatccccttctctgtgacacaccctgtccacgcccctggttcttagttccagccccactcataggacactcatagctcaggagggctccgccttcaatcccacccgctaaagtacttggagcggtctctccctccctcatcagcccaccaaaccaaacctagcctccaagagtgggaagaaattaaagcaagataggctattaagtgcagagggagagaaaatgcctccaacatgtgaggaagtaatgagagaaatcatagaattttaaggccatgatttaaggccatcatggccttaatcttccgcttcctcgctcactgactcgctgcgctcggtcgttcggctgcggcgagcggtatcagctcactcaaaggcggtaatacggttatccacagaatcaggggataacgcaggaaagaacatgtgagcaaaaggccagcaaaaggccaggaaccgtaaaaaggccgcgttgctggcgtttttccataggctccgcccccctgacgagcatcacaaaaatcgacgctcaagtcagaggtggcgaaacccgacaggactataaagataccaggcgtttccccctggaagctccctcgtgcgctctcctgttccgaccctgccgcttaccggatacctgtccgcctttctcccttcgggaagcgtggcgctttctcatagctcacgctgtaggtatctcagttcggtgtaggtcgttcgctccaagctgggctgtgtgcacgaaccccccgttcagcccgaccgctgcgccttatccggtaactatcgtcttgagtccaacccggtaagacacgacttatcgccactggcagcagccactggtaacaggattagcagagcgaggtatgtaggcggtgctacagagttcttgaagtggtggcctaactacggctacactagaagaacagtatttggtatctgcgctctgctgaagccagttaccttcggaaaaagagttggtagctcttgatccggcaaacaaaccaccgctggtagcggtggtttttttgtttgcaagcagcagattacgcgcagaaaaaaaggatctcaagaagatcctttgatcttttctacggggtctgacgctcagtggaacgaaaactcacgttaagggattttggtcatgagattatcaaaaaggatcttcacctagatccttttaaattaaaaatgaagttttaaatcaatctaaagtatatatgagtaaacttggtctgacagttaccaatgcttaatcagtgaggcacctatctcagcgatctgtctatttcgttcatccatagttgcctgactcggggggggggggcgctgaggtctgcctcgtgaagaaggtgttgctgactcataccaggcctgaatcgccccatcatccagccagaaagtgagggagccacggttgatgagagctttgttgtaggtggaccagttggtgattttgaacttttgctttgccacggaacggtctgcgttgtcgggaagatgcgtgatctgatccttcaactcagcaaaagttcgatttattcaacaaagccgccgtcccgtcaagtcagcgtaatgctctgccagtgttacaaccaattaaccaattctgattagaaaaactcatcgagcatcaaatgaaactgcaatttattcatatcaggattatcaataccatatttttgaaaaagccgtttctgtaatgaaggagaaaactcaccgaggcagttccataggatggcaagatcctggtatcggtctgcgattccgactcgtccaacatcaatacaacctattaatttcccctcgtcaaaaataaggttatcaagtgagaaatcaccatgagtgacgactgaatccggtgagaatggcaaaagcttatgcatttctttccagacttgttcaacaggccagccattacgctcgtcatcaaaatcactcgcatcaaccaaaccgttattcattcgtgattgcgcctgagcgagacgaaatacgcgatcgctgttaaaaggacaattacaaacaggaatcgaatgcaaccggcgcaggaacactgccagcgcatcaacaatattttcacctgaatcaggatattcttctaatacctggaatgctgttttcccggggatcgcagtggtgagtaaccatgcatcatcaggagtacggataaaatgcttgatggtcggaagaggcataaattccgtcagccagtttagtctgaccatctcatctgtaacatcattggcaacgctacctttgccatgtttcagaaacaactctggcgcatcgggcttcccatacaatcgatagattgtcgcacctgattgcccgacattatcgcgagcccatttatacccatataaatcagcatccatgttggaatttaatcgcggcctcgagcaagacgtttcccgttgaatatggctcataacaccccttgtattactgtttatgtaagcagacagttttattgttcatgatgatatatttttatcttgtgcaatgtaacatcagagattttgagacacaacgtggctttccccccccccccattattgaagcatttatcagggttattgtctcatgagcggatacatatttgaatgtatttagaaaaataaacaaataggggttccgcgcacatttccccgaaaagtgccacctgacgtctaagaaaccattattatcatgacattaacctataaaaataggcgtatcacgaggccctttcgtc

SEQ ID NO: 148 - DNA, 6105 bp, Artificial Sequence
  Plasmid DNA: VRC 7757
tcgcgcgtttcggtgatgacggtgaaaacctctgacacatgcagctcccggagacggtcacagcttgtctgtaagcggatgccgggagcagacaagcccgtcagggcgcgtcagcgggtgttggcgggtgtcggggctggcttaactatgcggcatcagagcagattgtactgagagtgcaccatatgcggtgtgaaataccgcacagatgcgtaaggagaaaataccgcatcagattggctattggccattgcatacgttgtatccatatcataatatgtacatttatattggctcatgtccaacattaccgccatgttgacattgattattgactagttattaatagtaatcaattacgggaacttccatagcccatatatggagttccgcgttacataacttacgggaatttccaaacctggctgaccgcccaacgacccccgcccattgacgtcaataatgacgtatgttcccatagtaacgccaatagggaacttccattgacgtcaatgggtggagtatttacggtaaactgcccacttgggaatttccaagtgtatcatatgccaagtacgccccctattgacgtcaatgacgggaacttccataagcttgcattatgcccagtacatgaccttatgggaatttcctacttggcagtacatctacgtattagtcatcgctattaccatggtgatgcggttttggcagtacatcaatgggcgtggatagcggtttgactcacgggaacttccaagtctccaccccattgacgtcaatgggagtttgttttgactcaccaaaatcaacgggaattcccaaaatgtcgtaacaactccgccccattgacgcaaatgggcggtaggcgtgtacggtgggaggtctatataagcagagctcgtttagtgaaccgtcagatcgcctggagacgccatccacgctgttttgacctccatagaagacaccgggaccgatccagcctccatcggctcgcatctctccttcacgcgcccgccgccctacctgaggccgccatccacgccggttgagtcgcgttctgccgcctcccgcctgtggtgcctcctgaactgcgtccgccgtctaggtaagtttaaagctcaggtcgagaccgggcctttgtccggcgctcccttggagcctacctagactcagccggctctccacgctttgcctgaccctgcttgctcaactctagttaacggtggagggcagtgtagtctgagcagtactcgttgctgccgcgcgcgccaccagacataatagctgacagactaacagactgttcctttccatgggtcttttctgcagtcaccgtcgtcgacacgatccgatatcgccgccaccatgaaggccaatctgctggtgctgctgtgcgccctggccgccgccgatgccgatacaatctgcatcggataccacgccaataatagcacagatacagtggatacagtgctggagaagaatgtgacagtgacacacagcgtgaatctgctggaggatagccacaatggaaagctgtgcagactgaagggaatcgctcctctgcagctgggaaagtgcaatatcgccggatggctgctgggaaatcctgagtgcgatcctctgctgcctgtgagaagctggagctacatcgtggagacacctaatagcgagaatggaatctgctaccctggagattttatcgattacgaggagctgagagagcagctgagcagcgtgagcagctttgagagatttgagatctttcctaaggagagcagctggcctaatcacaatacaacaaagggagtgacagccgcctgcagccacgccggaaagagcagcttttacagaaatctgctgtggctgacagagaaggagggaagctaccctaagctgaagaatagctacgtgaataagaagggaaaggaggtgctggtgctgtggggaatccaccaccctagcaatagcaaggatcagcagaatatctaccagaatgagaatgcctacgtgagcgtggtgacaagcaattacaatagaagatttacacctgagatcgccgagagacctaaggtgagagatcaggccggaagaatgaattactactggacactgctgaagcctggagatacaatcatctttgaggccaatggaaatctgatcgctcctagatacgcctttgccctgagcagaggatttggaagcggaatcatcacaagcaatgccagcatgcacgagtgcaatacaaagtgccagacacctctgggagccatcaatagcagcctgccttttcagaatatccaccctgtgacaatcggagagtgccctaagtacgtgagaagcgccaagctgagaatggtgacaggactgagaaatatccctcagagagagacgagaggactgtttggagccatcgccggatttatcgagggaggatggacaggaatgatcgatggatggtacggataccaccaccagaatgagcagggaagcggatacgccgccgatcagaagagcacacagaatgccatcaatggaatcacaaataaggtgaatagcgtgatcgagaagatgaatatccagtttacagccgtgggaaaggagtttaataagctggagaagagaatggagaatctgaataagaaggtggatgatggatttctggatatctggacatacaatgccgagctgctggtgctgctggagaatgagagaacactggattttcacgatagcaatgtgaagaatctgtacgagaaggtgaagagccagctgaagaataatgccaaggagatcggaaatggatgctttgagttttaccacaagtgcgataatgagtgcatggagagcgtgagaaatggaacatacgattaccctaagtacagcgaggagagcaagctgaatagagagaaggtggatggagtgaagctggagagcatgggaatctaccagatcctggccatctacagcacagtggccagcagcctggtgctgctggtgagcctgggagccatcagcttttggatgtgcagcaatggaagcctgcagtgcagaatctgcatctgagcggccgctctagaccaggccctggatccagatctgctgtgccttctagttgccagccatctgttgtttgcccctcccccgtgccttccttgaccctggaaggtgccactcccactgtcctttcctaataaaatgaggaaattgcatcgcattgtctgagtaggtgtcattctattctggggggtggggtggggcaggacagcaagggggaggattgggaagacaatagcaggcatgctggggatgcggtgggctctatgggtacccaggtgctgaagaattgacccggttcctcctgggccagaaagaagcaggcacatccccttctctgtgacacaccctgtccacgcccctggttcttagttccagccccactcataggacactcatagctcaggagggctccgccttcaatcccacccgctaaagtacttggagcggtctctccctccctcatcagcccaccaaaccaaacctagcctccaagagtgggaagaaattaaagcaagataggctattaagtgcagagggagagaaaatgcctccaacatgtgaggaagtaatgagagaaatcatagaattttaaggccatcatggccttaatcttccgcttcctcgctcactgactcgctgcgctcggtcgttcggctgcggcgagcggtatcagctcactcaaaggcggtaatacggttatccacagaatcaggggataacgcaggaaagaacatgtgagcaaaaggccagcaaaaggccaggaaccgtaaaaaggccgcgttgctggcgtttttccataggctccgcccccctgacgagcatcacaaaaatcgacgctcaagtcagaggtggcgaaacccgacaggactataaagataccaggcgtttccccctggaagctccctcgtgcgctctcctgttccgaccctgccgcttaccggatacctgtccgcctttctcccttcgggaagcgtggcgctttctcatagctcacgctgtaggtatctcagttcggtgtaggtcgttcgctccaagctgggctgtgtgcacgaaccccccgttcagcccgaccgctgcgccttatccggtaactatcgtcttgagtccaacccggtaagacacgacttatcgccactggcagcagccactggtaacaggattagcagagcgaggtatgtaggcggtgctacagagttcttgaagtggtggcctaactacggctacactagaagaacagtatttggtatctgcgctctgctgaagccagttaccttcggaaaaagagttggtagctcttgatccggcaaacaaaccaccgctggtagcggtggtttttttgtttgcaagcagcagattacgcgcagaaaaaaaggatctcaagaagatcctttgatcttttctacggggtctgacgctcagtggaacgaaaactcacgttaagggattttggtcatgagattatcaaaaaggatcttcacctagatccttttaaattaaaaatgaagttttaaatcaatctaaagtatatatgagtaaacttggtctgacagttaccaatgcttaatcagtgaggcacctatctcagcgatctgtctatttcgttcatccatagttgcctgactcggggggggggggcgctgaggtctgcctcgtgaagaaggtgttgctgactcataccaggcctgaatcgccccatcatccagccagaaagtgagggagccacggttgatgagagctttgttgtaggtggaccagttggtgattttgaacttttgctttgccacggaacggtctgcgttgtcgggaagatgcgtgatctgatccttcaactcagcaaaagttcgatttattcaacaaagccgccgtcccgtcaagtcagcgtaatgctctgccagtgttacaaccaattaaccaattctgattagaaaaactcatcgagcatcaaatgaaactgcaatttattcatatcaggattatcaataccatatttttgaaaaagccgtttctgtaatgaaggagaaaactcaccgaggcagttccataggatggcaagatcctggtatcggtctgcgattccgactcgtccaacatcaatacaacctattaatttcccctcgtcaaaaataaggttatcaagtgagaaatcaccatgagtgacgactgaatccggtgagaatggcaaaagcttatgcatttctttccagacttgttcaacaggccagccattacgctcgtcatcaaaatcactcgcatcaaccaaaccgttattcattcgtgattgcgcctgagcgagacgaaatacgcgatcgctgttaaaaggacaattacaaacaggaatcgaatgcaaccggcgcaggaacactgccagcgcatcaacaatattttcacctgaatcaggatattcttctaatacctggaatgctgttttcccggggatcgcagtggtgagtaaccatgcatcatcaggagtacggataaaatgcttgatggtcggaagaggcataaattccgtcagccagtttagtctgaccatctcatctgtaacatcattggcaacgctacctttgccatgtttcagaaacaactctggcgcatcgggcttcccatacaatcgatagattgtcgcacctgattgcccgacattatcgcgagcccatttatacccatataaatcagcatccatgttggaatttaatcgcggcctcgagcaagacgtttcccgttgaatatggctcataacaccccttgtattactgtttatgtaagcagacagttttattgttcatgatgatatatttttatcttgtgcaatgtaacatcagagattttgagacacaacgtggctttccccccccccccattattgaagcatttatcagggttattgtctcatgagcggatacatatttgaatgtatttagaaaaataaacaaataggggttccgcgcacatttccccgaaaagtgccacctgacgtctaagaaaccattattatcatgacattaacctataaaaataggcgtatcacgaggccctttcgtc

SEQ ID NO: 149 - DNA, 6105 bp, Artificial Sequence
  Plasmid DNA: VRC 7758
tcgcgcgtttcggtgatgacggtgaaaacctctgacacatgcagctcccggagacggtcacagcttgtctgtaagcggatgccgggagcagacaagcccgtcagggcgcgtcagcgggtgttggcgggtgtcggggctggcttaactatgcggcatcagagcagattgtactgagagtgcaccatatgcggtgtgaaataccgcacagatgcgtaaggagaaaataccgcatcagattggctattggccattgcatacgttgtatccatatcataatatgtacatttatattggctcatgtccaacattaccgccatgttgacattgattattgactagttattaatagtaatcaattacgggaacttccatagcccatatatggagttccgcgttacataacttacgggaatttccaaacctggctgaccgcccaacgacccccgcccattgacgtcaataatgacgtatgttcccatagtaacgccaatagggaacttccattgacgtcaatgggtggagtatttacggtaaactgcccacttgggaatttccaagtgtatcatatgccaagtacgccccctattgacgtcaatgacgggaacttccataagcttgcattatgcccagtacatgaccttatgggaatttcctacttggcagtacatctacgtattagtcatcgctattaccatggtgatgcggttttggcagtacatcaatgggcgtggatagcggtttgactcacgggaacttccaagtctccaccccattgacgtcaatgggagtttgttttgactcaccaaaatcaacgggaattcccaaaatgtcgtaacaactccgccccattgacgcaaatgggcggtaggcgtgtacggtgggaggtctatataagcagagctcgtttagtgaaccgtcagatcgcctggagacgccatccacgctgttttgacctccatagaagacaccgggaccgatccagcctccatcggctcgcatctctccttcacgcgcccgccgccctacctgaggccgccatccacgccggttgagtcgcgttctgccgcctcccgcctgtggtgcctcctgaactgcgtccgccgtctaggtaagtttaaagctcaggtcgagaccgggcctttgtccggcgctcccttggagcctacctagactcagccggctctccacgctttgcctgaccctgcttgctcaactctagttaacggtggagggcagtgtagtctgagcagtactcgttgctgccgcgcgcgccaccagacataatagctgacagactaacagactgttcctttccatgggtcttttctgcagtcaccgtcgtcgacacgatccgatatcgccgccaccatgaaggccaatctgctggtgctgctgtgcgccctggccgccgccgatgccgatacaatctgcatcggataccacgccaataatagcacagatacagtggatacagtgctggagaagaatgtgacagtgacacacagcgtgaatctgctggaggatagccacaatggaaagctgtgcagactgaagggaatcgctcctctgcagctgggaaagtgcaatatcgccggatggctgctgggaaatcctgagtgcgatcctctgctgcctgtgagaagctggagctacatcgtggagacacctaatagcgagaatggaatctgctaccctggagattttatcgattacgaggagctgagagagcagctgagcagcgtgagcagctttgagagatttgagatctttcctaaggagagcagctggcctaatcacaatacaacaaagggagtgacagccgcctgcagccacgccggaaagagcagcttttacagaaatctgctgtggctgacagagaaggagggaagctaccctaagctgaagaatagctacgtgaataagaagggaaaggaggtgctggtgctgtggggaatccaccaccctagcaatagcaaggatcagcagaatatctaccagaatgagaatgcctacgtgagcgtggtgacaagcaattacaatagaagatttacacctgagatcgccgagagacctaaggtgagagatcaggccggaagaatgaattactactggacactgctgaagcctggagatacaatcatctttgaggccaatggaaatctgatcgctcctagatacgcctttgccctgagcagaggatttggaagcggaatcatcacaagcaatgccagcatgcacgagtgcaatacaaagtgccagacacctctgggagccatcaatagcagcctgccttttcagaatatccaccctgtgacaatcggagagtgccctaagtacgtgagaagcgccaagctgagaatggtgacaggactgagaaatatccctagcatccagagcagaggactgtttggagccatcgccggatttatcgagggaggatggacaggaatgatcgatggatggtacggataccaccaccagaatgagcagggaagcggatacgccgccgatcagaagagcacacagaatgccatcaatggaatcacaaataaggtgaatagcgtgatcgagaagatgaatatccagtttacagccgtgggaaaggagtttaataagctggagaagagaatggagaatctgaataagaaggtggatgatggatttctggatatctggacatacaatgccgagctgctggtgctgctggagaatgagagaacactggattttcacgatagcaatgtgaagaatctgtacgagaaggtgaagagccagctgaagaataatgccaaggagatcggaaatggatgctttgagttttaccacaagtgcgataatgagtgcatggagagcgtgagaaatggaacatacgattaccctaagtacagcgaggagagcaagctgaatagagagaaggtggatggagtgaagctggagagcatgggaatctaccagatcctggccatctacagcacagtggccagcagcctggtgctgctggtgagcctgggagccatcagcttttggatgtgcagcaatggaagcctgcagtgcagaatctgcatctgagcggccgctctagaccaggccctggatccagatctgctgtgccttctagttgccagccatctgttgtttgcccctcccccgtgccttccttgaccctggaaggtgccactcccactgtcctttcctaataaaatgaggaaattgcatcgcattgtctgagtaggtgtcattctattctggggggtggggtggggcaggacagcaagggggaggattgggaagacaatagcaggcatgctggggatgcggtgggctctatgggtacccaggtgctgaagaattgacccggttcctcctgggccagaaagaagcaggcacatccccttctctgtgacacaccctgtccacgcccctggttcttagttccagccccactcataggacactcatagctcaggagggctccgccttcaatcccacccgctaaagtacttggagcggtctctccctccctcatcagcccaccaaaccaaacctagcctccaagagtgggaagaaattaaagcaagataggctattaagtgcagagggagagaaaatgcctccaacatgtgaggaagtaatgagagaaatcatagaattttaaggccatcatggccttaatcttccgcttcctcgctcactgactcgctgcgctcggtcgttcggctgcggcgagcggtatcagctcactcaaaggcggtaatacggttatccacagaatcaggggataacgcaggaaagaacatgtgagcaaaaggccagcaaaaggccaggaaccgtaaaaaggccgcgttgctggcgtttttccataggctccgcccccctgacgagcatcacaaaaatcgacgctcaagtcagaggtggcgaaacccgacaggactataaagataccaggcgtttccccctggaagctccctcgtgcgctctcctgttccgaccctgccgcttaccggatacctgtccgcctttctcccttcgggaagcgtggcgctttctcatagctcacgctgtaggtatctcagttcggtgtaggtcgttcgctccaagctgggctgtgtgcacgaaccccccgttcagcccgaccgctgcgccttatccggtaactatcgtcttgagtccaacccggtaagacacgacttatcgccactggcagcagccactggtaacaggattagcagagcgaggtatgtaggcggtgctacagagttcttgaagtggtggcctaactacggctacactagaagaacagtatttggtatctgcgctctgctgaagccagttaccttcggaaaaagagttggtagctcttgatccggcaaacaaaccaccgctggtagcggtggtttttttgtttgcaagcagcagattacgcgcagaaaaaaaggatctcaagaagatcctttgatcttttctacggggtctgacgctcagtggaacgaaaactcacgttaagggattttggtcatgagattatcaaaaaggatcttcacctagatccttttaaattaaaaatgaagttttaaatcaatctaaagtatatatgagtaaacttggtctgacagttaccaatgcttaatcagtgaggcacctatctcagcgatctgtctatttcgttcatccatagttgcctgactcggggggggggggcgctgaggtctgcctcgtgaagaaggtgttgctgactcataccaggcctgaatcgccccatcatccagccagaaagtgagggagccacggttgatgagagctttgttgtaggtggaccagttggtgattttgaacttttgctttgccacggaacggtctgcgttgtcgggaagatgcgtgatctgatccttcaactcagcaaaagttcgatttattcaacaaagccgccgtcccgtcaagtcagcgtaatgctctgccagtgttacaaccaattaaccaattctgattagaaaaactcatcgagcatcaaatgaaactgcaatttattcatatcaggattatcaataccatatttttgaaaaagccgtttctgtaatgaaggagaaaactcaccgaggcagttccataggatggcaagatcctggtatcggtctgcgattccgactcgtccaacatcaatacaacctattaatttcccctcgtcaaaaataaggttatcaagtgagaaatcaccatgagtgacgactgaatccggtgagaatggcaaaagcttatgcatttctttccagacttgttcaacaggccagccattacgctcgtcatcaaaatcactcgcatcaaccaaaccgttattcattcgtgattgcgcctgagcgagacgaaatacgcgatcgctgttaaaaggacaattacaaacaggaatcgaatgcaaccggcgcaggaacactgccagcgcatcaacaatattttcacctgaatcaggatattcttctaatacctggaatgctgttttcccggggatcgcagtggtgagtaaccatgcatcatcaggagtacggataaaatgcttgatggtcggaagaggcataaattccgtcagccagtttagtctgaccatctcatctgtaacatcattggcaacgctacctttgccatgtttcagaaacaactctggcgcatcgggcttcccatacaatcgatagattgtcgcacctgattgcccgacattatcgcgagcccatttatacccatataaatcagcatccatgttggaatttaatcgcggcctcgagcaagacgtttcccgttgaatatggctcataacaccccttgtattactgtttatgtaagcagacagttttattgttcatgatgatatatttttatcttgtgcaatgtaacatcagagattttgagacacaacgtggctttccccccccccccattattgaagcatttatcagggttattgtctcatgagcggatacatatttgaatgtatttagaaaaataaacaaataggggttccgcgcacatttccccgaaaagtgccacctgacgtctaagaaaccattattatcatgacattaacctataaaaataggcgtatcacgaggccctttcgtc

SEQ ID NO: 150 - DNA, 5754 bp, Artificial Sequence
  Plasmid DNA: VRC 7759
tcgcgcgtttcggtgatgacggtgaaaacctctgacacatgcagctcccggagacggtcacagcttgtctgtaagcggatgccgggagcagacaagcccgtcagggcgcgtcagcgggtgttggcgggtgtcggggctggcttaactatgcggcatcagagcagattgtactgagagtgcaccatatgcggtgtgaaataccgcacagatgcgtaaggagaaaataccgcatcagattggctattggccattgcatacgttgtatccatatcataatatgtacatttatattggctcatgtccaacattaccgccatgttgacattgattattgactagttattaatagtaatcaattacgggaacttccatagcccatatatggagttccgcgttacataacttacgggaatttccaaacctggctgaccgcccaacgacccccgcccattgacgtcaataatgacgtatgttcccatagtaacgccaatagggaacttccattgacgtcaatgggtggagtatttacggtaaactgcccacttgggaatttccaagtgtatcatatgccaagtacgccccctattgacgtcaatgacgggaacttccataagcttgcattatgcccagtacatgaccttatgggaatttcctacttggcagtacatctacgtattagtcatcgctattaccatggtgatgcggttttggcagtacatcaatgggcgtggatagcggtttgactcacgggaacttccaagtctccaccccattgacgtcaatgggagtttgttttgactcaccaaaatcaacgggaattcccaaaatgtcgtaacaactccgccccattgacgcaaatgggcggtaggcgtgtacggtgggaggtctatataagcagagctcgtttagtgaaccgtcagatcgcctggagacgccatccacgctgttttgacctccatagaagacaccgggaccgatccagcctccatcggctcgcatctctccttcacgcgcccgccgccctacctgaggccgccatccacgccggttgagtcgcgttctgccgcctcccgcctgtggtgcctcctgaactgcgtccgccgtctaggtaagtttaaagctcaggtcgagaccgggcctttgtccggcgctcccttggagcctacctagactcagccggctctccacgctttgcctgaccctgcttgctcaactctagttaacggtggagggcagtgtagtctgagcagtactcgttgctgccgcgcgcgccaccagacataatagctgacagactaacagactgttcctttccatgggtcttttctgcagtcaccgtcgtcgacacgatccgatatcgccgccaccatgaatcctaataagaagatcatcacaatcggaagcatctgcatggtgacaggaatggtgagcctgatgctgcagatcggaaatctgatcagcatctgggtgagccacagcatccacacaggaaatcagcacaaggccgagcctatcagcaatacaaattttctgacagagaaggccgtggccagcgtgaagctggccggaaatagcagcctgtgccctatcaatggatgggccgtgtacagcaaggataatagcatcagaatcggaagcaagggagatgtgtttgtgatcagagagccttttatcagctgcagccacctggagtgcagaacattttttctgacacagggagccctgctgaatgataagcacagcaatggaacagtgaaggatagaagccctcacagaacactgatgagctgccctgtgggagaggcccctagcccttacaatagcagatttgagagcgtggcctggagcgccagcgcctgccacgatggaacaagctggctgacaatcggaatcagcggacctgataatggagccgtggccgtgctgaagtacaatggaatcatcacagatacaatcaagagctggagaaataatatcctgagaacacaggagagcgagtgcgcctgcgtgaatggaagctgctttacagtgatgacagatggacctagcaatggacaggccagccacaagatctttaagatggagaagggaaaggtggtgaagagcgtggagctggatgcccctaattaccactacgaggagtgcagctgctaccctgatgccggagagatcacatgcgtgtgcagagataattggcacggaagcaatagaccttgggtgagctttaatcagaatctggagtaccagatcggatacatctgcagcggagtgtttggagataatcctagacctaatgatggaacaggaagctgcggacctgtgagcagcaatggagcctacggagtgaagggatttagctttaagtacggaaatggagtgtggatcggaagaacaaagagcacaaatagcagaagcggatttgagatgatctgggaccctaatggatggacagagacagatagcagctttagcgtgaagcaggatatcgtggccatcacagattggagcggatacagcggaagctttgtgcagcaccctgagctgacaggactggattgcatcagaccttgcttttgggtggagctgatcagaggaagacctaaggagagcacaatctggacaagcggaagcagcatcagcttttgcggagtgaatagcgatacagtgggatggagctggcctgatggagccgagctgccttttacaatcgataagtgagcggccgctctagaccaggccctggatccagatctgctgtgccttctagttgccagccatctgttgtttgcccctcccccgtgccttccttgaccctggaaggtgccactcccactgtcctttcctaataaaatgaggaaattgcatcgcattgtctgagtaggtgtcattctattctggggggtggggtggggcaggacagcaagggggaggattgggaagacaatagcaggcatgctggggatgcggtgggctctatgggtacccaggtgctgaagaattgacccggttcctcctgggccagaaagaagcaggcacatccccttctctgtgacacaccctgtccacgcccctggttcttagttccagccccactcataggacactcatagctcaggagggctccgccttcaatcccacccgctaaagtacttggagcggtctctccctccctcatcagcccaccaaaccaaacctagcctccaagagtgggaagaaattaaagcaagataggctattaagtgcagagggagagaaaatgcctccaacatgtgaggaagtaatgagagaaatcatagaattttaaggccatcatggccttaatcttccgcttcctcgctcactgactcgctgcgctcggtcgttcggctgcggcgagcggtatcagctcactcaaaggcggtaatacggttatccacagaatcaggggataacgcaggaaagaacatgtgagcaaaaggccagcaaaaggccaggaaccgtaaaaaggccgcgttgctggcgtttttccataggctccgcccccctgacgagcatcacaaaaatcgacgctcaagtcagaggtggcgaaacccgacaggactataaagataccaggcgtttccccctggaagctccctcgtgcgctctcctgttccgaccctgccgcttaccggatacctgtccgcctttctcccttcgggaagcgtggcgctttctcatagctcacgctgtaggtatctcagttcggtgtaggtcgttcgctccaagctgggctgtgtgcacgaaccccccgttcagcccgaccgctgcgccttatccggtaactatcgtcttgagtccaacccggtaagacacgacttatcgccactggcagcagccactggtaacaggattagcagagcgaggtatgtaggcggtgctacagagttcttgaagtggtggcctaactacggctacactagaagaacagtatttggtatctgcgctctgctgaagccagttaccttcggaaaaagagttggtagctcttgatccggcaaacaaaccaccgctggtagcggtggtttttttgtttgcaagcagcagattacgcgcagaaaaaaaggatctcaagaagatcctttgatcttttctacggggtctgacgctcagtggaacgaaaactcacgttaagggattttggtcatgagattatcaaaaaggatcttcacctagatccttttaaattaaaaatgaagttttaaatcaatctaaagtatatatgagtaaacttggtctgacagttaccaatgcttaatcagtgaggcacctatctcagcgatctgtctatttcgttcatccatagttgcctgactcggggggggggggcgctgaggtctgcctcgtgaagaaggtgttgctgactcataccaggcctgaatcgccccatcatccagccagaaagtgagggagccacggttgatgagagctttgttgtaggtggaccagttggtgattttgaacttttgctttgccacggaacggtctgcgttgtcgggaagatgcgtgatctgatccttcaactcagcaaaagttcgatttattcaacaaagccgccgtcccgtcaagtcagcgtaatgctctgccagtgttacaaccaattaaccaattctgattagaaaaactcatcgagcatcaaatgaaactgcaatttattcatatcaggattatcaataccatatttttgaaaaagccgtttctgtaatgaaggagaaaactcaccgaggcagttccataggatggcaagatcctggtatcggtctgcgattccgactcgtccaacatcaatacaacctattaatttcccctcgtcaaaaataaggttatcaagtgagaaatcaccatgagtgacgactgaatccggtgagaatggcaaaagcttatgcatttctttccagacttgttcaacaggccagccattacgctcgtcatcaaaatcactcgcatcaaccaaaccgttattcattcgtgattgcgcctgagcgagacgaaatacgcgatcgctgttaaaaggacaattacaaacaggaatcgaatgcaaccggcgcaggaacactgccagcgcatcaacaatattttcacctgaatcaggatattcttctaatacctggaatgctgttttcccggggatcgcagtggtgagtaaccatgcatcatcaggagtacggataaaatgcttgatggtcggaagaggcataaattccgtcagccagtttagtctgaccatctcatctgtaacatcattggcaacgctacctttgccatgtttcagaaacaactctggcgcatcgggcttcccatacaatcgatagattgtcgcacctgattgcccgacattatcgcgagcccatttatacccatataaatcagcatccatgttggaatttaatcgcggcctcgagcaagacgtttcccgttgaatatggctcataacaccccttgtattactgtttatgtaagcagacagttttattgttcatgatgatatatttttatcttgtgcaatgtaacatcagagattttgagacacaacgtggctttccccccccccccattattgaagcatttatcagggttattgtctcatgagcggatacatatttgaatgtatttagaaaaataaacaaataggggttccgcgcacatttccccgaaaagtgccacctgacgtctaagaaaccattattatcatgacattaacctataaaaataggcgtatcacgaggccctttcgtc

SEQ ID NO: 151 - protein, 8 aa, Influenza Virus H1(1918)
IPSIQSRG

SEQ ID NO: 152 - protein, 8 aa, Influenza Virus H1(1918)
IPQRETRG

SEQ ID NO: 153 - protein, 12 aa, Influenza virus H5
IPQRERRRKKRG

SEQ ID NO: 154 - protein, 12 aa, Influenza virus H5
SPQRERRRKKRG

SEQ ID NO: 155 - protein, 26 aa, Bacteriophage T4
GYIPEAPRDGQAYVRKDGEWVLLSTF

SEQ ID NO: 156 - protein, 7 aa, Artificial Sequence
  HA cleavage site mutation
PQRETRG

SEQ ID NO: 157 - protein, 12 aa, Artificial Sequence
  HA cleavage site mutation
IPQRERRRKKRG

SEQ ID NO: 158 - protein, 12 aa, Artificial Sequence
  HA cleavage site mutation
SPQRERRRKKRG

SEQ ID NO: 159 - DNA, 22 bp, Artificial Sequence
  oligonucleotide
gcaccaaaatcaacgggacttt

SEQ ID NO: 160 - DNA, 24 bp, Artificial Sequence
  oligonucleotide
actcaccaaaatcaacgggaattc

SEQ ID NO: 161 - DNA, 1735 bp, Artificial Sequence
  Plasmid DNA insert sequence for VRC 7720
gatccgatatcgccgccaccatggagaagatcgtgctgctgttcgccatcgtgagcctggtgaagagcgatcagatctgcatcggataccacgccaataatagcacagagcaggtggatacaatcatggagaagaatgtgacagtgacacacgcccaggatatcctggagaagacacacaatggaaagctgtgcgatctggatggagtgaagcctctgatcctgagagattgcagcgtggccggatggctgctgggaaatcctatgtgcgatgagttcatcaatgtgcctgagtggagctacatcgtggagaaggccaatcctgtgaatgatctgtgctaccctggagatttcaatgattacgaggagctgaagcacctgctgagcagaatcaatcacttcgagaagatccagatcatccctaagagcagctggagcagccacgaggccagcctgggagtgagcagcgcctgcccttaccagagaaagagcagcttcttcagaaatgtggtgtggctgatcaagaagaatagcacataccctacaatcaagagaagctacaataatacaaatcaggaggatctgctggtgctgtggggaatccaccaccctaatgatgccgccgagcagacaaagctgtaccagaatcctacaacatacatcagcgtgggaacaagcacactgaatcagagactggtgcctagaatcgccacaagaagcaaggtgaatggacagagcggaagaatggagttcttctggacaatcctgaagcctaatgatgccatcaatttcgagagcaatggaaatttcatcgctcctgagtacgcctacaagatcgtgaagaagggagatagcacaatcatgaagagcgagctggagtacggaaattgcaatacaaagtgccagacacctatgggagccatcaatagcagcatgcctttccacaatatccaccctctgacaatcggagagtgccctaagtacgtgaagagcaatagactggtgctggccacaggactgagaaatagccctcagagagagagaagaagaaagaagagaggactgttcggagccatcgccggattcatcgagggaggatggcagggaatggtggatggatggtacggataccaccacagcaatgagcagggaagcggatacgccgccgataaggagagcacacagaaggccatcgatggagtgacaaataaggtgaatagcatcatcgataagatgaatacacagttcgaggccgtgggaagagagttcaataatctggagagaagaatcgagaatctgaataagaagatggaggatggattcctggatgtgtggacatacaatgccgagctgctggtgctgatggagaatgagagaacactggatttccacgatagcaatgtgaagaatctgtacgataaggtgagactgcagctgagagataatgccaaggagctgggaaatggatgcttcgagttctaccacaagtgcgataatgagtgcatggagagcgtgagaaatggaacatacgattaccctcagtacagcgaggaggccagactgaagagagaggagatcagcggagtgaagctggagagcatcggaatctaccagatcctgagcatctacagcacagtggccagcagcctggccctggccatcatggtggccggactgagcctgtggatgtgcagcaatggaagcctgcagtgcagaatctgcatctgagcggccgc

SEQ ID NO: 162 - DNA, 1695 bp, Artificial Sequence
  Plasmid DNA insert sequence for VRC 7721
atggagaagatcgtgctgctgttcgccatcgtgagcctggtgaagagcgatcagatctgcatcggataccacgccaataatagcacagagcaggtggatacaatcatggagaagaatgtgacagtgacacacgcccaggatatcctggagaagacacacaatggaaagctgtgcgatctggatggagtgaagcctctgatcctgagagattgcagcgtggccggatggctgctgggaaatcctatgtgcgatgagttcatcaatgtgcctgagtggagctacatcgtggagaaggccaatcctgtgaatgatctgtgctaccctggagatttcaatgattacgaggagctgaagcacctgctgagcagaatcaatcacttcgagaagatccagatcatccctaagagcagctggagcagccacgaggccagcctgggagtgagcagcgcctgcccttaccagagaaagagcagcttcttcagaaatgtggtgtggctgatcaagaagaatagcacataccctacaatcaagagaagctacaataatacaaatcaggaggatctgctggtgctgtggggaatccaccaccctaatgatgccgccgagcagacaaagctgtaccagaatcctacaacatacatcagcgtgggaacaagcacactgaatcagagactggtgcctagaatcgccacaagaagcaaggtgaatggacagagcggaagaatggagttcttctggacaatcctgaagcctaatgatgccatcaatttcgagagcaatggaaatttcatcgctcctgagtacgcctacaagatcgtgaagaagggagatagcacaatcatgaagagcgagctggagtacggaaattgcaatacaaagtgccagacacctatgggagccatcaatagcagcatgcctttccacaatatccaccctctgacaatcggagagtgccctaagtacgtgaagagcaatagactggtgctggccacaggactgagaaatagccctcagagagagacgagaggactgttcggagccatcgccggattcatcgagggaggatggcagggaatggtggatggatggtacggataccaccacagcaatgagcagggaagcggatacgccgccgataaggagagcacacagaaggccatcgatggagtgacaaataaggtgaatagcatcatcgataagatgaatacacagttcgaggccgtgggaagagagttcaataatctggagagaagaatcgagaatctgaataagaagatggaggatggattcctggatgtgtggacatacaatgccgagctgctggtgctgatggagaatgagagaacactggatttccacgatagcaatgtgaagaatctgtacgataaggtgagactgcagctgagagataatgccaaggagctgggaaatggatgcttcgagttctaccacaagtgcgataatgagtgcatggagagcgtgagaaatggaacatacgattaccctcagtacagcgaggaggccagactgaagagagaggagatcagcggagtgaagctggagagcatcggaatctaccagatcctgagcatctacagcacagtggccagcagcctggccctggccatcatggtggccggactgagcctgtggatgtgcagcaatggaagcctgcagtgcagaatctgcatctga

SEQ ID NO: 163 - DNA, 1720 bp, Artificial Sequence
  Plasmid DNA insert sequence for VRC 7722
gatatcgccaccatgaaggccaaactgctggtgctgctgtgtacctttaccgccacctacgccgacacaatctgtatcggctaccacgccaacaatagcaccgacaccgtggatacagtgctggagaagaacgtgaccgtgacccactctgtgaacctgctggaggacagccacaatggcaagctgtgtctgctgaaaggcattgcccctctgcagctgggcaattgttctgtggccggatggattctgggcaaccccgagtgtgagctgctgatttctaaggagagctggagctacatcgtggagacccccaatcctgagaatggcacctgctaccctggctacttcgccgattacgaggagctgcgcgagcagctgtctagcgtgtccagcttcgagagattcgagatcttccccaaggagtccagctggcctaatcacacagtgacaggcgtgtctgccagctgtagccacaacggcaaaagcagcttctaccggaacctgctgtggctgacaggcaagaatggcctgtaccccaacctgagcaagagctacgtgaacaacaaggaaaaggaagtgctggtgctgtggggagtgcaccaccctcccaacatcggaaatcagcgggccctgtaccacacagagaacgcctatgtgagcgtggtgtccagccactacagcagaagattcacccccgagatcgccaagagacccaaagtgagagaccaggagggccggatcaattactactggaccctgctggagcctggcgataccatcatcttcgaggccaacggcaatctgatcgccccttggtatgcctttgccctgagcagaggctttggcagcggcatcatcacaagcaacgcccccatggatgagtgtgatgccaagtgccagacacctcagggcgccatcaatagcagcctgcccttccagaatgtgcaccctgtgaccatcggcgagtgccccaagtatgtgagaagcgccaagctgagaatggtgaccggcctgagaaacatccctagcatccagagcagaggactgtttggagccatcgccggattcatcgagggaggatggacaggcatggtggatggctggtacggctaccaccaccagaatgagcagggctctggatatgccgccgatcagaagtctacccagaacgccatcaacggcatcaccaacaaggtgaacagcgtgatcgagaagatgaacacccagtttaccgctgtgggcaaggagttcaacaagctggagcggaggatggagaacctgaacaagaaggtggacgacggctttctggacatctggacctacaatgccgaactcctggtcctcctcgagaatgagaggaccctggacttccacgacagcaacgtgaagaacctgtatgagaaggtgaagagccagctgaagaacaacgccaaggagatcggcaacggctgcttcgagttctaccacaagtgtaacaacgagtgtatggagagcgtgaagaacggcacctacgactaccctaagtacagcgaggagagcaagctgaaccgggagaagatcgatggcgtgaagctggagagcatgggcgtgtatcagatcctggccatctacagcacagtggcctcttctctggtgctgctggtgtctctgggcgccatctccttttggatgtgctccaacggcagcctgcagtgcaggatctgtatctgatgaacacgtg

SEQ ID NO: 164 - DNA, 1720 bp, Artificial Sequence
  Plasmid DNA insert sequence for VRC 7723 (VRC 7727)
gatatcgccaccatgaaggccaaactgctggtgctgctgtgtacctttaccgccacctacgccgacacaatctgtatcggctaccacgccaacaatagcaccgacaccgtggatacagtgctggagaagaacgtgaccgtgacccactctgtgaacctgctggaggacagccacaatggcaagctgtgtctgctgaaaggcattgcccctctgcagctgggcaattgttctgtggccggatggattctgggcaaccccgagtgtgagctgctgatttctaaggagagctggagctacatcgtggagacccccaatcctgagaatggcacctgctaccctggctacttcgccgattacgaggagctgcgcgagcagctgtctagcgtgtccagcttcgagagattcgagatcttccccaaggagtccagctggcctaatcacacagtgacaggcgtgtctgccagctgtagccacaacggcaaaagcagcttctaccggaacctgctgtggctgacaggcaagaatggcctgtaccccaacctgagcaagagctacgtgaacaacaaggaaaaggaagtgctggtgctgtggggagtgcaccaccctcccaacatcggaaatcagcgggccctgtaccacacagagaacgcctatgtgagcgtggtgtccagccactacagcagaagattcacccccgagatcgccaagagacccaaagtgagagaccaggagggccggatcaattactactggaccctgctggagcctggcgataccatcatcttcgaggccaacggcaatctgatcgccccttggtatgcctttgccctgagcagaggctttggcagcggcatcatcacaagcaacgcccccatggatgagtgtgatgccaagtgccagacacctcagggcgccatcaatagcagcctgcccttccagaatgtgcaccctgtgaccatcggcgagtgccccaagtatgtgagaagcgccaagctgagaatggtgaccggcctgagaaacatccctcagagggagaccagaggactgtttggagccatcgccggattcatcgagggaggatggacaggcatggtggatggctggtacggctaccaccaccagaatgagcagggctctggatatgccgccgatcagaagtctacccagaacgccatcaacggcatcaccaacaaggtgaacagcgtgatcgagaagatgaacacccagtttaccgctgtgggcaaggagttcaacaagctggagcggaggatggagaacctgaacaagaaggtggacgacggctttctggacatctggacctacaatgccgaactcctggtcctcctcgagaatgagaggaccctggacttccacgacagcaacgtgaagaacctgtatgagaaggtgaagagccagctgaagaacaacgccaaggagatcggcaacggctgcttcgagttctaccacaagtgtaacaacgagtgtatggagagcgtgaagaacggcacctacgactaccctaagtacagcgaggagagcaagctgaaccgggagaagatcgatggcgtgaagctggagagcatgggcgtgtatcagatcctggccatctacagcacagtggcctcttctctggtgctgctggtgtctctgggcgccatctccttttggatgtgctccaacggcagcctgcagtgcaggatctgtatctgatgaacacgtg

SEQ ID NO: 165 - DNA, 1723 bp, Artificial Sequence
  Plasmid DNA insert sequence for VRC 7724
gatatcgccaccatgaaaaccatcatcgccctgagctacatcctgtgcctggtgttcagccagaagctgcccggcaacgataatagcaccgccacactgtgtctgggacaccacgccgtgcctaatggcaccatcgtgaaaacaatcaccaacgaccagatcgaggtgaccaatgccacagagctggtgcagtctagcagcacaggcggcatctgtgatagccctcaccagatcctggatggcgagaactgtaccctgatcgatgccctgctgggagatcctcagtgtgacggcttccagaacaaaaagtgggacctgttcgtggagagaagcaaggcctacagcaactgctacccctacgacgtgcctgattacgccagcctgagatctctggtggcctcttctggcaccctggagttcaacaacgagagcttcaactgggccggagtgacacagaatggcaccagcagcgcctgtaagcggagaagcaacaagagcttcttcagcaggctgaactggctgacccacctgaagtacaagtaccccgccctgaatgtgaccatgcccaacaatgagaagttcgacaagctgtacatctggggagtgcaccaccctgtgaccgatagcgatcagatcagcctgtatgcccaggccagcggaagaatcacagtgagcaccaagagaagccagcagaccgtgatccccaacatcggctacagacccagagtgagggacatcagcagccggatcagcatctactggacaatcgtgaagcctggcgacatcctgctgatcaacagcaccggcaatctgattgcccccaggggctacttcaagatcaggagcggcaagagcagcatcatgagaagcgatgcccctatcggcaagtgtaacagcgagtgtatcacccccaatggcagcatccccaacgacaagcccttccagaacgtgaaccggatcacctatggcgcctgccctagatacgtgaagcagaacaccctgaagctggccaccggcatgagaaatgtgcccgagaagcagaccagaggcatctttggagccatcgccggattcatcgagaatggctgggagggaatggtggatggctggtacggcttcagacaccagaatagcgagggaacaggacaggccgccgatctgaaatctacacaggccgccatcaaccagatcaacggcaagctgaacaggctgatcggcaagaccaacgagaagttccaccagatcgaaaaggaattcagcgaggtggagggcagaatccaggacctggagaagtacgtggaggacaccaagatcgacctgtggagctacaatgccgaactgctggtggccctggagaatcagcacaccatcgacctgaccgacagcgagatgaacaagctgttcgagcggaccaagaagcagctgcgcgagaacgccgaggatatgggcaatggctgctttaagatctaccacaagtgtgacaacgcctgtatcgagagcatccggaacggcacctacgatcacgacgtgtacagagatgaggccctgaacaaccggtttcagatcaagggcgtggagctgaagagcggctacaaggactggattctgtggatcagcttcgccatcagctgctttctgctgtgtgtggccctgctgggctttattatgtgggcctgccagaagggcaacatccgctgtaacatctgtatctgatgaacacgtg

SEQ ID NO: 166 - DNA, 1723 bp, Artificial Sequence
  Plasmid DNA insert sequence for VRC 7725 (VRC 7729)
gatatcgccaccatgaaaaccatcatcgccctgagctacatcctgtgcctggtgttcagccagaagctgcccggcaacgataatagcaccgccacactgtgtctgggacaccacgccgtgcctaatggcaccatcgtgaaaacaatcaccaacgaccagatcgaggtgaccaatgccacagagctggtgcagtctagcagcacaggcggcatctgtgatagccctcaccagatcctggatggcgagaactgtaccctgatcgatgccctgctgggagatcctcagtgtgacggcttccagaacaaaaagtgggacctgttcgtggagagaagcaaggcctacagcaactgctacccctacgacgtgcctgattacgccagcctgagatctctggtggcctcttctggcaccctggagttcaacaacgagagcttcaactgggccggagtgacacagaatggcaccagcagcgcctgtaagcggagaagcaacaagagcttcttcagcaggctgaactggctgacccacctgaagtacaagtaccccgccctgaatgtgaccatgcccaacaatgagaagttcgacaagctgtacatctggggagtgcaccaccctgtgaccgatagcgatcagatcagcctgtatgcccaggccagcggaagaatcacagtgagcaccaagagaagccagcagaccgtgatccccaacatcggctacagacccagagtgagggacatcagcagccggatcagcatctactggacaatcgtgaagcctggcgacatcctgctgatcaacagcaccggcaatctgattgcccccaggggctacttcaagatcaggagcggcaagagcagcatcatgagaagcgatgcccctatcggcaagtgtaacagcgagtgtatcacccccaatggcagcatccccaacgacaagcccttccagaacgtgaaccggatcacctatggcgcctgccctagatacgtgaagcagaacaccctgaagctggccaccggcatgagaaatgtgccccagagagagaccagaggcatctttggagccatcgccggattcatcgagaatggctgggagggaatggtggatggctggtacggcttcagacaccagaatagcgagggaacaggacaggccgccgatctgaaatctacacaggccgccatcaaccagatcaacggcaagctgaacaggctgatcggcaagaccaacgagaagttccaccagatcgaaaaggaattcagcgaggtggagggcagaatccaggacctggagaagtacgtggaggacaccaagatcgacctgtggagctacaatgccgaactgctggtggccctggagaatcagcacaccatcgacctgaccgacagcgagatgaacaagctgttcgagcggaccaagaagcagctgcgcgagaacgccgaggatatgggcaatggctgctttaagatctaccacaagtgtgacaacgcctgtatcgagagcatccggaacggcacctacgatcacgacgtgtacagagatgaggccctgaacaaccggtttcagatcaagggcgtggagctgaagagcggctacaaggactggattctgtggatcagcttcgccatcagctgctttctgctgtgtgtggccctgctgggctttattatgtgggcctgccagaagggcaacatccgctgtaacatctgtatctgatgaacacgtg

SEQ ID NO: 167 - DNA, 8 bp, Artificial Sequence
  oligonucleotide
ggggattt

SEQ ID NO: 168 - DNA, 7 bp, Artificial Sequence
  oligonucleotide
gggactt

SEQ ID NO: 169 - DNA, 8 bp, Artificial Sequence
  oligonucleotide
gggacttt

SEQ ID NO: 170 - DNA, 8 bp, Artificial Sequence
  oligonucleotide
gggaattt

SEQ ID NO: 171 - DNA, 15 bp, Artificial Sequence
  oligonucleotide
taaatggcccgcctg

SEQ ID NO: 172 - DNA, 16 bp, Artificial Sequence
  oligonucleotide
gaacttccataagctt

SEQ ID NO: 173 - DNA, 12 bp, Artificial Sequence
  oligonucleotide
ggcagtacatca

SEQ ID NO: 174 - DNA, 11 bp, Artificial Sequence
  oligonucleotide
gggaatttcca

SEQ ID NO: 175 - DNA, 9 bp, Artificial Sequence
  oligonucleotide
gggactttc

SEQ ID NO: 176 - DNA, 9 bp, Artificial Sequence
  oligonucleotide
gggaacttc

SEQ ID NO: 177 - DNA, 11 bp, Artificial Sequence
  oligonucleotide
taaatggcggg

SEQ ID NO: 178 - DNA, 11 bp, Artificial Sequence
  oligonucleotide
gaatttccaaa

SEQ ID NO: 179 - DNA, 13 bp, Artificial Sequence
  oligonucleotide
ggggtcattagtt

SEQ ID NO: 180 - DNA, 9 bp, Artificial Sequence
  oligonucleotide
gggaacttc

SEQ ID NO: 181 - protein, 45 aa, Artificial Sequence
  thrombin site, fibritin trimerization sequence and His tag
RSLVPRGSPGSGYIPEAPRDGQAYVRKDGEWVLLSTFLGHHHHHH

SEQ ID NO: 182 - protein, 7 aa, Artificial Sequence
  HA cleavage site mutation
PQRETRG

SEQ ID NO: 183 - protein, 10 aa, Artificial Sequence
  Unconventional Nuclear Localization Sequence
  VARIANT 2, 8, 9: Xaa = Any Amino Acid
TXTKRSYXXM

SEQ ID NO: 184 - protein, 19 aa, Artificial Sequence
  Bipartite Nuclear Localization Sequence
KRGINDRNFWRGENERKTR

1-170. (canceled)

171. A nucleic acid molecule comprising:
a CMV/R or CMV/R 8κB backbone; and
a polynucleotide encoding a modified hemaagglutinin (HA) protein, wherein the protein comprises a modified proteolytic cleavage site that reduces proteolytic processing of the HA protein.

172. The nucleic acid molecule of claim 171, wherein the modified HA protein comprises the amino acids PQRETR in the proteolytic cleavage site.

173. The nucleic acid molecule of claim 171, wherein the backbone is the CMV/R backbone.

174. The nucleic acid molecule of claim 171, wherein the backbone is the CMV/R 8κB backbone.

175. The nucleic acid molecule of claim 171, wherein the HA protein is encoded with a truncation at the carboxy terminal end.

176. The nucleic acid molecule of claim 171, wherein the polynucleotide is codon optimized for humans.

177. The nucleic acid molecule of claim 171, wherein said molecule is at least 95% identical to plasmid VRC 9123.

178. The nucleic acid molecule of claim 171, wherein the HA protein is an A/Thailand/1 (KAN-1)/2004 strain of HA.

179. The nucleic acid molecule of claim 178, wherein the modified HA protein comprises the amino acids PQRETR in the proteolytic cleavage site.

180. The nucleic acid molecule of claim 178, wherein the polynucleotide is codon optimized for humans.

181. The nucleic acid molecule of claim 178, wherein said molecule is at least 95% identical to plasmid VRC 7720.

182. The nucleic acid molecule of claim 171, wherein said molecule is at least 95% identical to plasmid VRC7721.

183. The nucleic acid molecule of claim 171, wherein said molecule is at least 95% identical to plasmid VRC7722.

184. The nucleic acid molecule of claim 171, wherein said molecule is at least 95% identical to plasmid VRC7727.

185. A pharmaceutical composition comprising:
a CMV/R or CMV/R 8κB backbone;
a polynucleotide encoding a modified hemaagglutinin (HA) protein, wherein the protein comprises a modified proteolytic cleavage site that reduces proteolytic processing of the HA protein; and
a pharmaceutically acceptable solution in a therapeutically effective dose.

186. The composition of claim 185, additionally comprising an adjuvant or nucleic acid encoding an adjuvant.

187. The composition of claim 186, wherein said adjuvant is a cytokine.

188. The composition of claim 185, for use as a vaccine to prevent influenza infection in a mammal.

189. A vaccine composition comprising a vector having a CMV/R or CMV/R 8κB backbone and a polynueleotide encoding a modified hemaagglutinin (HA) protein, wherein the protein comprises a modified proteolytic cleavage site that reduces proteolytic processing of the HA protein.

190. The vaccine composition of claim 189, wherein said HA protein is an A/Thailand/1 (KAN-1)/2004 strain of HA.

191. The vaccine composition of claim 189, wherein said composition comprises a plurality of vectors encoding a modified HA proteins from different serotypes of influenza viruses.

192. A pseudotyped lentiviral particle pseudotyped with an influenza HA protein comprising:
(a) a lentiviral vector plasmid expressing luciferase,
(b) lentiviral structural and accessory proteins sufficient for assembly of a lentiviral particle, and
(c) influenza HA protein, wherein the influenza HA protein effectively pseudotypes the lentiviral particle.

193. A method of preventing the symptoms of an influenza A infection, comprising:
identifying a person susceptible to influenza A infection; and
administering the nucleic acid molecule of claim 171 to the person.
